(19) United States
(12) Patent Application Publication
(10) Pub. No.: US 2016/0038575 A1
(43) Pub. Date: Feb. 11, 2016

(54) COMPOSITIONS AND METHODS FOR IMMUNE TOLERANCE INDUCTION TO FACTOR VIII REPLACEMENT THERAPIES IN SUBJECTS WITH HEMOPHILIA A

(71) Applicants: HAPLOMICS, INC., Atlanta, GA (US); THE REGENTS OF THE UNIVERSITY OF CALIFORNIA, Oakland, CA (US); DEPARTMENT OF VETERANS AFFAIRS, Washington, DC (US)

(72) Inventors: Tommy E. HOWARD, Redondo Beach, CA (US); Vincent LA TERZA, Atlanta, GA (US)

(21) Appl. No.: 14/776,709

(22) PCT Filed: Mar. 17, 2014
(86) PCT No.: PCT/US14/30314

§ 371 Date: Sep. 14, 2015

Related U.S. Application Data
(60) Provisional application No. 61/792,102, filed on Mar. 15, 2013.

(51) Int. Cl. A61K 39/00; A61K 47/48; A61K 47/34

(52) U.S. Cl. CPC A61K 39/001; A61K 47/34; A61K 47/482; A61K 2039/6093; A61K 2039/577

(57) ABSTRACT

This disclosure relates to tolerance inducing peptide (TIP) derived from the amino acid reference locus (AARL) within a FVIII replacement product (FVIIIrp) based on the differences between the expression product of a subject's F8 gene (sFVIII) and the FVIIIrp to provide tolerance induction before, during, and/or after a FVIII replacement therapy in a subject suffering from Hemophila A. Methods of deriving, making, and using the TIP are also disclosed. In some embodiments, the TIP is associated with a nanoparticle, e.g., PLGA or PLGA-PEMA nanoparticle.

### CROSS REFERENCE TO RELATED APPLICATIONS

[0001] This application claims priority to U.S. provisional patent application Ser. No. 61/792,102, filed on Mar. 15, 2013 to Howard et al., entitled “Compositions and Methods for Immune Tolerance Induction to Factor VIII Replacement Therapies in Subjects with Hemophilia A,” incorporated herein by reference.

### GOVERNMENT RIGHTS

[0002] Development of the inventions described herein was at least partially funded with government support through NIH/NHLBI Grant RC2 HL 101851 and the U.S. government has certain rights in the inventions.

### FIELD OF THE INVENTION

[0003] This invention is in the area of compositions for and improved methods of inducing tolerance or reducing or minimizing an immune response to a FVIII replacement product in a subject suffering from hemophilia who will receive, is receiving, or has received the FVIII replacement product by administering tolerance inducing peptides, or sets of peptides, derived from the amino acid differences between the subject's endogenous FVIII and the FVIII replacement product.

### BACKGROUND OF THE INVENTION

[0004] Hemophilia A (HA) is a congenital bleeding disorder caused by loss-of-function mutations in the X-linked Factor VIII (FVIII) gene, F8. FVIII is an essential cofactor in the blood coagulation pathway. Defects within the F8 gene affect about one in 5000 males. The levels of functional FVIII in circulation determine the severity of the disease, with plasma levels 5-25% of normal being mild, 1-5% being moderate, and <1% being severe. As such, only a small amount of circulating protein is necessary to provide protection from spontaneous bleeding episodes.

[0005] Patients with HA are treated with FVIII replacement therapies, i.e., infusions of either extracted and pooled human plasma-derived (pd)FVIII and/or recombinant (r)FVIII replacement products. Currently available rFVIII replacement products include the commercially available Kogenate® (Bayer) and Helixate® (ZLB Behring), Recombinate® (Baxter) and Advate® (Baxter), and the B-domain deleted Refacto® (Pfizer) and Xyntha® (Pfizer). pdFVIII is largely derived from pooled blood collections in Europe and the United States. In many cases, treatment with FVIII replacements provides efficient management of this chronic disease. In approximately 25-30% of cases, however, this treatment leads to the patients developing anti-FVIII neutralizing antibodies, termed inhibitors, which reduces the effectiveness of the FVIII replacement or, in the worst case, renders the replacement ineffective (Lacroix-Desmazes et al., Pathophysiology of inhibitors to FVIII in patients with haemophilia A. Haemophilia 2002: 8: 273-9). In hemophilia A patients of African-American descent, inhibitors occur in approximately 50% of individuals following FVIII replacement therapy. The development of inhibitors leads to the neutralization of the pro-coagulant function of the FVIIII replacement or enhances its removal from the plasma (Lacroix-Desmazes et al., Dynamics of factor VIII interactions determine its immunologic fate in hemophilia A. Blood 2008; 112: 240-9). The development of FVIII inhibitors significantly increases the morbidity and lowers the quality of life for patients who develop inhibitors, and represents the greatest limitation to successful FVIII replacement therapy (Darby et al., The incidence of factor VIII and factor IX inhibitors in the hemophilia population of the UK and their effect on subsequent mortality, 1977-99. J Throm Haemost 2004: 2: 1047-54; Ehrenforth et al., Incidence of development of factor VIII and factor IX inhibitors in hemophiliacs. Lancet 1992; 339: 594-8; Lusher et al., Recombinant factor VIII for the treatment of previously untreated patients with hemophilia A. Safety, efficacy, and development of inhibitors. Kogenate Previously Untreated Patient Study Group. NEJM 1993; 328: 453-9).

[0006] Inhibitors can be transient or low-responding (i.e., a peak Bethesda titer <5 BU/mL) or high-responding (i.e., a peak Bethesda titer >5 BU/mL). In low-responding inhibitor patients, bleeding episodes may be managed by administering increased FVIII replacement dosages. In patients with high-responding inhibitors, bleeding episodes are generally managed by administering by-passing agents such as recombinant activated factor VII and activated prothrombin complex concentrates (Paisley et al., The management of inhibitors in haemophilia A: introduction and systematic review of current practice. Haemophilia 2003; 9; 405-17; Bentorp et al., Inhibitor treatment in haemophilias A and B: summary statement for the 2006 international consensus conference. Haemophilia 2006; 12 (Suppl. 6): 1-7). For example, FEIBA® is a plasma derived bypassing agent that includes activated FX and prothrombin. NovoSeven®, a recombinant bypassing agent (rFVIIa), is also used to control bleeding in high responder patients. While its mechanism of action is still debated, what is known is that NovoSeven®'s bypassing activity and ability to provide hemostasis in bleeding HA patients with FVIII inhibitors requires infusion at markedly supra-physiologic levels (Shibeko et al., Unifying the mechanism of recombinant FVIIa action: dose dependence is regulated differently by tissue factor and phospholipids. Blood 2012; 120: 891-9). Regardless of the underlying mechanism, its effects are variable across patients leading to high dosing protocols. The licensed dosing regimen for NovoSeven® is 90 μg/kg given up to every 2-hours (Shapiro et al., Prospective, randomised trial of two doses of rFVIIa (NovoSeven) in haemophilia patients with inhibitors undergoing surgery. Thromb Haemost 1998; 80: 773-8). A major shortcoming of bypassing agents is the lack of quantitative clinical laboratory assays necessary to accurately monitor procoagulant activity to guide therapy. The challenge presented by this opacity is exacerbated by the absence of an optimal dose or dosing schedule for bypassing agents (Acharya et al., Management of factor VIII inhibitors. Best Pract Res Clin Haematol 2006; 19: 51-66). Furthermore, bypassing agents can and have been reported to induce thromboembolic events.

[0007] Restoring FVIII replacement treatment efficacy is highly desirable to improve outcomes for patients who have developed FVIII inhibitors. Currently, strategies to induce immune tolerance to replacement FVIII therapies in patients who have developed inhibitors consists of regular and prolonged administration of FVIII replacement concentrates (See Coppola et al., Optimizing management of immune tolerance induction in patients with severe haemophilia A and inhibitors: towards evidence-based approaches. British J Haem 2010; 150: 515-28). Both high-dose and low-dose protocols have been attempted with mixed results, and each protocol can be demanding on patients and extremely expensive, as continuous infusions of FVIII replacement products for various time periods are generally employed. For example, in Europe, immune tolerance induction treatment of at least 6 to 12 months is suggested (Astermark et al., Current European practice in immune tolerance induction therapy in patients with haemophilia and inhibitors. Haemophilia 2006; 12: 363-71). In clinical practice, these induction strategies are often continued beyond 33 months, as some patients may require longer duration of treatment for achieving tolerance (Kurth et al., Immune tolerance therapy utilizing factor VIII/von Willebrand factor concentrate in haemophilia A patients with high titre factor VIII inhibitors. Haemophilia 2008; 14: 50-55). Importantly, utilizing these strategies results in a significant increased risk in the number of bleeding episodes at all stages of tolerance induction. It fails in 20% to 40% of patients and is challenging to implement, especially in children given the continuous need for vein access for administration of the infusions (Coppola et al., Optimizing management of immune tolerance induction in patients with severe haemophilia A and inhibitors: towards evidence-based approaches. British J Haem 2010; 150: 515-28).

[0008] Although immune tolerance induction therapies to FVIII replacement products have been around for many years, there is very little experimental data elaborating the mechanism of action of repetitive, long term FVIII infusion mediated tolerance. While it has been suggested that T cell immune exhaustion (over stimulation and subsequent T cell anergy or apoptosis) plays a role in achieving tolerance utilizing these strategies, there is no experimental evidence to support this hypothesis (Waters et al., The molecular mechanisms of immunomodulation and tolerance induction to factor VIII. J Throm Haemost 2009; 7: 1446-56). Several studies investigating the mechanisms of tolerance induction have shown that high FVIII levels inhibit memory B cell differentiation, and that tolerance induction can lead to the generation of anti-idiotypic Abs in cured patients (Gilles et al., Neutralizing anti-idiotypic antibodies to factor VIII inhibitors after desensitization in patients with hemophilia A. J Clin Invest 1996; 97: 1382-8; Hausl et al., High-dose factor VIII inhibits factor VIII-specific memory B cells in hemophilia A with factor VIII inhibitors. Blood 2005; 106: 3415-22; Hausl et al., Preventing re-stimulation of memory B cells in hemophilia A: a potential new strategy for the treatment of antibody dependent immune disorders. Blood 2004; 104: 115-22; Gilles et al., In vivo neutralization of a C2 domain-specific human anti-Factor VIII inhibitor by an anti-idiotypic antibody. Blood 2004; 103: 2617-23). As previously mentioned, however, tolerance induction through this route requires the continuous use of FVIII replacement product, is expensive, can take years to work, and occurs after the patient has already developed inhibitors.

[0009] Given the drawbacks of current therapeutic options to manage inhibitor patients and the limitations, arduous nature and expense of immune tolerance protocols, there is a need for strategies that achieve FVIII replacement therapy tolerance before, during, and/or after a patient develops inhibitors. Furthermore, there is a need to develop immune tolerance strategies able to impart tolerance to FVIII replacement products that do not require daily, long term FVIII replacement product infusions.

### SUMMARY OF THE INVENTION

[0010] Methods and compositions are provided for the minimization of an undesired immune response and/or induction of immune tolerance to a FVIII replacement product in subjects having hemophilia A and who will be administered, are being administered, or have been administered a FVIII replacement product (FVIIIrp). In particular, the present invention provides for the identification of amino acid differences between the expression product of a subject's F8 gene (sFVIII) and the FVIIIrp including the recombinant FVIII replacement product (rFVIIIrp) or plasma-derived FVIII replacement product (pdFVIIIrp) used to restore FVIII activity and coagulation in the subject, and the creation of overlapping sets of tolerogenic peptides (termed herein as tolerance inducing peptides (TIPs)) based on such amino acid differences that are administered to the subject in order to minimize an undesired immune response and/or induce tolerance to the FVIIIrp, for example, by preventing, minimizing, reducing, or eliminating inhibitor formation against the FVIIIrp In particular embodiments, the FVIIIrp is a rFVIIIrp.

[0011] The amino acid differences between the sFVIII and FVIIIrp may fall within T-cell epitopes that are capable of inducing an undesired immune response to the FVIIIrp when the FVIIIrp is administered to the subject. These differences may include an amino acid residue difference at a single locus or an amino acid residue difference at more than one locus, for example in the case of a missense mutation or the presence of nsSNPs, or both. These differences may include the presence of amino acid residues in the FVIIIrp at one or more loci that are not present in the sFVIII due to a deletion in the subject's F8 gene. Or, in the case of F8 intron 22 inversion mutations—the most common mutation in severe FVIII deficiency—the differences may include amino acid residues that arise due to the proteolytic liberation of a T cell epitope which occurs in the FVIIIrp, which does not occur with the subject's endogenous FVIII or is not made available so as to react with the subject's immune system by a proteolytic event involving the subject's endogenous FVIII. For subjects receiving rFVIIIrp lacking a B-domain (B-domain deleted rFVIIIrp or “BDD-rFVIIIrp”), these differences may include short linker peptides connecting the A2 and A3 domains of the BDD-rFVIIIrp that result in potential T-cell epitopes due to a novel protein sequence that is not present in subject's endogenous FVIII proteins.

[0012] Amino acid residue difference between the sFVIII and FVIIIrp are positioned or mapped within specific loci in the FVIIIrp, wherein the differing FVIIIrp amino acids—individually termed the amino acid reference locus (AARL)—serves as a reference point or points for the preparation of a set or sets of tolerizing peptides—termed tolerizing amino acids (“TAAs”) or tolerance inducing peptides (“TIPs”) that may incorporate T-cell epitopes capable of inducing immune tolerance of, or the prevention, reduction, or elimination of inhibitor development by the subject to the FVIIIrp. Each TIP within a set includes a FVIIIrp amino acid residing at a reference locus, and a TIP set includes between about 9 to 21 separate peptides of between 9 to 21 amino acids in length, wherein the number of peptides in a TIP set is directly correlated with the length of the TIP (i.e., a TIP set containing TIPs each having 9 amino acids in length will contain 9 peptides; a TIP set containing TIPs each having 10 amino acids in length will contain 10 peptides, etc.).

[0013] A method of designing the amino acid sequence residue required to derive a TIP or TIP set is generally as follows. The first peptide of each TIP set has as its first amino acid position the first amino acid residue of a reference locus of the FVIIIrp, while the remaining amino acid residues are identical to the downstream amino acids in the FVIIIrp across the length of the TIP. If only a single amino acid residue difference exists at the locus (for example in the case of a missense mutation or nsSNP), then the reference locus will consist of a single amino acid residue. If the differences encompass more than one contiguous amino acid residue (for example in the case of some deletions), then the first differing amino acid residue in the FVIIIrp will serve as the reference locus. For example, if the TIP is 9 amino acids in length, the first amino acid in the first peptide will be the first amino acid of the reference locus, and the remaining 8 amino acid residues will be the 8 loci residues of the FVIIIrp immediately downstream from the reference locus (as determined from amino acid position 1 to 2332 in the wt FVIII protein). The second peptide of each TIP has as its second amino acid position the reference locus, with the first amino acid position being the first amino acid residue in the FVIIIrp immediately upstream from the reference locus, and the remaining 7 amino acid residues being the 7 loci residues of the FVIIIrp immediately downstream from the reference locus. As such, for each successive TIP in the TIP set, the reference locus is shifted one amino acid position downstream, and the first amino acid reflects a shift from the preceding peptide of one amino acid upstream in the FVIIIrp. Accordingly, the last TIP of the set—in the preceding example, the ninth peptide—will have the reference locus in the last amino acid residue position, and be preceded by upstream amino acid residues—in the preceding example, the 8 residues of the FVIIIrp immediately upstream of the reference locus. The same method described above can be generally used to create TIP sets of varying peptide sizes, wherein the reference locus in each successive peptide in the set is shifted one position downstream and the first amino acid position in each successive peptide is shifted one residue upstream from the first amino acid position in the preceding peptide, until the reference locus occupies the last amino acid position in the last peptide of the set.

[0014] Following the method of generating sets of TIPs as described above, a set of TIPs will correspond with a contiguous portion of the FVIIIrp across 2X−1 amino acids, where X is the length of the peptides contained in the set. For example, as described in the preceding example, a TIP set containing 9 peptides, each being 9 amino acids in length, will as a set overlap with 17 contiguous amino acids of the FVIIIrp. Furthermore, the contiguous FVIIIrp amino acid sequence overlapped by the TIPs will include X−1 amino acid residues upstream and X−1 amino acid residues downstream from the first amino acid of the reference locus within the FVIIIrp, wherein X is the length of the peptides contained in the set. For example, a set of 9 peptides of 9 amino acids in length will overlap with 8 amino acids upstream and 8 amino acids downstream from the first amino acid of the reference locus within the FVIIIrp. This general process will be applicable to the generation of TIP sets for most identified amino acid differences, with a few exceptions, for example in the derivation of TIP sets to a few BDD-rFVIIIrp synthetic linker as described further herein.

[0015] The present invention provides for the administration of an effective amount of one or more of the overlapping TIPs from each TIP set in order to prevent or limit the development of, or minimize, reduce, or eliminate the existence of, inhibitors to the specific FVIIIrp. In certain embodiments, a set of TIPs comprising at least 9 peptides of 9 amino acids in length each are administered. Without wishing to be bound by any particular theory, it is believed that peptides that have the potential to be proteolysis products and be presented by MHC molecules in a subject's antigen presenting cells (APCs) can be immunogenic and initiate the development of inhibitors. By administering an effective amount of specific TIPs in a tolerizing fashion, the present invention provides for a targeted tolerance induction and/or minimized or reduced immune response strategy to potential T cell epitopes in the FVIIIrp that are implemented prior to the development of inhibitors, or, if inhibitors have already developed, in a more tolerable and less expensive approach than current tolerance inducing protocols which require repetitive, long term infusion of FVIIIrp. The administration of the TIPs and TIP sets described herein may result in a reduction of measurable Bethesda titer units to a FVIIIrp in a subject that already has inhibitors to a FVIIIrp. For example, the reduction of measurable Bethesda titer units is at least 10%, i.e., 20%, 30%, 40%, 50%, 60%, 70%, 80%, 90%, 95%, or 99.9%.

[0016] By determining a subject's endogenous FVIII amino acid sequence and comparing it to the known amino acid sequence of a rFVIIIrp, differences between the sFVIII and the rFVIIIrp amino acid sequences are identified, and sets of peptides comprising TIPs are created, wherein one or more TIPs from each set, or, in some embodiments the entire TIP set, are administered to induce tolerance in the subject that will be, is, or has been receiving the rFVIIIrp. Differences between a sFVIII and a rFVIIIrp can result from, for example, mis sense mutations in the subject's F8 gene, nonsynonymous single-nucleotide polymorphisms (nsSNPs) or haplotypic variations between the sFVIII and rFVIIIrp, deletions, inversions, for example intron 1 or 22 inversions, administration of rFVIIIrp with synthetic linker sequences, for example BDD-rFVIIIrp, and the like, or combinations thereof.

[0017] The reference locus of a TIP may positionally correlate with an amino acid substitution in the sFVIII caused by a missense mutation in the subject's F8 gene. In one embodiment, sets of TIPs containing at least 9 amino acids and including a reference locus are derived from the TIPs described in Tables 2-87. In one embodiment, at least one TIP from a TIP set described in Tables 2-87 are administered to minimize an undesired immune response to a FVIIIrp. In one embodiment, at least the first 9 peptides comprising the first 9 amino acids of a TIP set described in Tables 2-87 are administered. In one embodiment, at least the first 15 peptides comprising the first 15 amino acids of a TIP set described in Tables 2-87 are administered to minimize an undesired immune response. In one embodiment, at least the first 17 peptides comprising the first 17 amino acids of a TIP set described in Tables 2-87 are administered to induce tolerance. In one embodiment, a TIP set described in Tables 2-87 is administered to minimize an undesired immune response.

[0018] The currently available rFVIIIrp products are derived from H1 and or H2 wild-type haplotypes. Furthermore, pdFVIIIrp is largely derived from donors having the H1 haplotype. In one embodiment, the reference locus of the TIP positionally correlates with a nsSNP or haplotypic variation contained in the sFVIII. In one embodiment, a set of TIPs containing at least 9 amino acids and including a reference locus are derived from the TIPs described in Tables 88-101. In one embodiment, at least one TIP from a TIP set described in Tables 88-101 are administered to minimize an undesired immune response. In one embodiment, at least the first 9 peptides comprising the first 9 amino acids of a TIP set described in Tables 88-101 are administered to minimize an undesired immune response. In one embodiment, at least the first 15 peptides comprising the first 15 amino acids of a TIP set described in Tables 88-101 are administered to minimize an undesired immune response. In one embodiment, at least the first 17 peptides comprising the first 17 amino acids of a TIP set described in Tables 88-101 are administered to minimize an undesired immune response. In one embodiment, a TIP set described in Tables 88-101 are administered to minimize an undesired immune response.

[0019] Generally, subject's with the F8 intron 22 inversion express the entire FVIII protein intracellularly, albeit on two separate polypeptides. Importantly, another gene, F8_{B}, is also generally expressed in both normal and HA subjects. The expression product of the F8_{B} gene, FVIII_{B}, has sequence identity with a portion of the C1 domain and the entire C2 domain of FVIII. The presence of this FVIII_{B} polypeptide is important from a tolerance standpoint as it serves as a source for any T cells epitope or B cell epitopes needed to support processes that occur in the thymus (T cell clonal deletion) and spleen (B cell anergy) to achieve central tolerance. The expression product of F8_{I22I} starts at residue 1 and ends at residue 2124. The polypeptide expressed by the F8_{B} begins at residue 2125 and ends at residue 2332. Accordingly subjects having the F8_{I22I} have the requisite FVIII material to yield one or more FVIII peptides ending at or before residue 2124, the last amino acid encoded by exon 22, or beginning at or after residue 2125, the first amino acid encoded by exon 23. Any potential T cell epitope within such a peptide would be expected to be recognized as a self-antigen and not be immunogenic in the subject. Peptides spanning the junction between residues 2124 and 2125, if proteolyzed from a FVIIIrp and presented by MHC class II molecules, however, would be “foreign” and potentially harbor immunogenic T cell epitopes in an F8_{I22I} subject. Because of this, all subjects having F8_{I22I} mutations have similar reference loci across residues 2124Val and 2125Met with respect to all currently available rFVIIIrp, and a set of TIPs containing at least 9 amino acids and including this MV rFVIIIrp locus are derived from the TIPs described in Table 102. In one embodiment, at least one TIP from the TIP set described in Table 102 are administered to minimize an undesired immune response. In one embodiment, at least the first 9 peptides comprising the first 9 amino acids of a TIP set described in Table 102 are administered to minimize an undesired immune response. In one embodiment, at least the first 15 peptides comprising the first 15 amino acids of a TIP set described in Table 102 are administered to minimize an undesired immune response. In one embodiment, at least the first 17 peptides comprising the first 17 amino acids of a TIP set described in Table 102 are administered to minimize an undesired immune response. In one embodiment, a TIP set described in Table 102 are administered to minimize an undesired immune response.

[0020] In one embodiment, the reference locus of a TIP positionally correlates with a differing amino acid sequence within the rFVIIIrp caused by the removal of the B-domain from a BDD-rFVIIIrp. In certain BDD-rFVIIIrp, a deletion of 894 internal codons and splicing codons 762 and 1657 creates a FVIII product containing 1438 amino acids. The BDD-rFVIIIrp contains a synthetic junctional 14-peptide sequence SFS-QNPPVLKRHQR formed by covalent attachment of the three N-terminal most residues of the B-domain, S⁷⁴¹F⁷⁴²S⁷⁴³, to the 11 C-terminal-most residues Q¹⁶³⁸N¹⁶³⁹P¹⁶⁴⁰P¹⁶⁴¹V¹⁶⁴²L¹⁶⁴³K¹⁶⁴⁴R¹⁶⁴⁵H¹⁶⁴⁶Q¹⁶⁴⁷R¹⁶⁴⁸. This synthetic linker creates 11 unique peptides across a 15 amino acid sequence within the BDD-rFVIIIrp, which have potential immunogenicity. In one embodiment, a set of TIPs containing at least 9 amino acids and including a reference locus are derived from the TIPs described in Table 103. In one embodiment, at least one TIP from a TIP set described in Table 103 can administered to minimize an undesired immune response. In one embodiment, at least the first 5 peptides comprising the first 9 amino acids of the TIP set described in Table 103 are administered to minimize an undesired immune response. In one embodiment, a TIP set described in Table 103 are administered to minimize an undesired immune response.

[0021] Once TIP sets are identified, one or more of the peptides from the TIP set are manufactured and administered to the subject in a tolerizing fashion. In one embodiment, peptides of the TIP set are analyzed to identify immunodominant T-cell epitopes and at least one or more of the peptides containing immunodominant T-cell epitopes are administered. In some aspects, the immunodominant T-cell epitope is an epitope known to bind with high affinity to one or more MHC class II molecules, such binding being a prerequisite to stimulate an immune response against rFVIIIrp by presentation on MHC-class II. In one embodiment, at least one TIP from at least one TIP set is administered. In one embodiment, more than one TIP from at least one TIP set is administered.

[0022] In one aspect of the invention, compositions and methods directed to TIP sets comprising at least 9 peptides, and in the case of BDD-rFVIIIrp differences at least 5 peptides, containing at least 9 amino acids and including a reference locus are provided. By administering a set of TIPs associated with a potential T cell epitope in the rFVIIIrp, as opposed to less than all identified such TIPs, the requirement that immunodominant T-cell epitopes be analyzed according to MHC-II binding affinity correlated with a subject's HLA profile is by-passed. Furthermore, by administering a set of TIPs, the potential that a MHC-II binding epitope, if it exists, will be administered from the set is enhanced, as all identified peptides are administered. In one embodiment, the entire set of TIPs directed to a reference locus is administered. In one embodiment, the entire set of TIPs for each identified reference locus is administered. One of ordinary skill in the art will appreciate that particularly in the context of administration to a rFVIIIrp naive subject or to a subject that is free of anti-FVIII inhibitors, if a subject's MHC-II repertoire is not competent to present a set of TIPs, the risk of an untoward immune response being triggered by potentially immunogenic T cell epitopes residing in the rFVIIIrp is minimal, since the subject's MHC-II will not be competent to present them either.

[0023] A sFVIII and a FVIIIrp may have more than one amino acid difference across their respective sequences. For example, the subject may have both a mis sense mutation and a different FVIII haplotype than that of the FVIIIrp, rendering more than one differences between the sequences, or other differences due to other causative combinations of amino acid differences. In such as case, it is contemplated that a set of TIPs directed to each reference locus may be developed, and TIPs from one or more of the TIP sets may be administered. In one embodiment, at least one TIP from at least one TIP set is administered. In one embodiment, at least one TIP from two or more TIP sets is administered. In one embodiment, at least one TIP directed to each identified reference locus is administered. In one embodiment, the entire set of TIPs for each identified reference locus is administered.

[0024] TIPs directed to reference loci may be administered before, during, or after exposure to a FVIIIrp. In one embodiment, at least one TIP from a TIP set, or alternatively the entire TIP set, is administered prophylactically to a subject that has not previously been treated with the FVIIIrp. In one embodiment, at least one TIP from a TIP set, or alternatively the entire TIP set, is administered to a subject who is currently undergoing treatment with the FVIIIrp, but has not yet developed inhibitors to the specific FVIIIrp. In one embodiment, at least one TIP from a TIP set, or alternatively the entire TIP set, is administered to a subject concomitantly with the FVIIIrp. In one embodiment, at least one TIP from a TIP set, or alternatively the entire TIP set, is administered to a subject who has previously been treated with the FVIIIrp. In one embodiment, at least one TIP from a TIP set, or alternatively the entire TIP set, is administered as a tolerizing maintenance dose to a subject who has previously been tolerized to an FVIIIrp.

[0025] In some embodiments, the TIPs described herein are combined with immune suppressive compounds, or administered in conjunction with immune suppressive compounds, that are capable of inducing antigen-specific adaptive regulatory T cells, including but not limited to IL-10, rapamycin (or other limus compounds, including but not limited to biolimus A9, everolimus, tacrolimus, and zotarolimus), and/or TGF-β, and/or combinations thereof.

[0026] In some embodiments, the TIPs described herein are administered as an alternative to, an adjunct to, or in addition to, other FVIII tolerance induction therapy. For example, in one embodiment, at least one TIP from a TIP set, or alternatively the entire TIP set, is administered to a subject who has developed inhibitors to the FVIIIrp and is undergoing standard tolerance induction therapy, for example, a repetitive long term FVIIIrp infusion.

[0027] TIPs for administration are from about 9 amino acids to about 22 amino acids in length. The length of each TIP within each TIP set is generally the same, that is, all peptides within the TIP set will be the same amino acid length. The length of peptides between different TIP sets are the same length, or, in an alternative embodiment, different in length. For example, a subject with, for example, two separate amino acid differences between his FVIII protein and the FVIIIrp, are administered tolerogenic peptides from two TIP sets, wherein the first TIP set is directed to a first reference locus wherein each peptide in the set is, for example, 16 amino acids in length, and a second TIP set is directed to a second reference locus the length of the peptides within a particular TIP set is between about 9 amino acids and 22 amino acids. In one embodiment, the length of the peptides within a particular TIP set is at least 9 amino acids, at least 10 amino acids, at least 11 amino acids, at least 12 amino acids, at least 13 amino acids, at least 14 amino acids, at least 15 amino acids, at least 16 amino acids, at least 17 amino acids, at least 18 amino acids, at least 19 amino acids, at least 20 amino acids, at least 21 amino acids, or at least 22 amino acids. In one embodiment, the length of the peptides within a particular TIP set is 9 amino acids, 10 amino acids, 11 amino acids, 12 amino acids, 13 amino acids, 14 amino acids, 15 amino acids, 16 amino acids, 17 amino acids, 18 amino acids, 19 amino acids, 20 amino acids, 21 amino acids, or 22 amino acids. In one embodiment, the length of the TIPs within the TIP set is 9 amino acids. In one embodiment, the length of the TIPs within the TIP set is 15 amino acids. In one embodiment, the length of the TIPs within the TIP set is between 17 and 21 amino acids. In one embodiment, the length of the TIPs within the TIP set is 17 amino acids. In one embodiment, the length of the TIPs within the TIP set is 18 amino acids. In one embodiment, the length of the TIPs within the TIP set is 19 amino acids. In one embodiment, the length of the TIPs within the TIP set is 20 amino acids. In one embodiment, the length of the TIPs within the TIP set is 21 amino acids.

[0028] At least one TIP, or alternatively a TIP set, from more than one TIP set targeting the same reference locus can be administered. For example, a first TIP set may comprise peptides of, for example, 9 amino acids, and a second TIP set targeting the same reference locus may comprise peptides of, for example, 16 amino acids, wherein both TIP sets are directed to the same reference locus.

[0029] Generally, the length of the peptides within each set of TIPs will determine the number of peptides contained within each set. For example, if the length of the peptides within a set is 21 amino acids in length, then 21 peptides will be contained in that particular TIP set.

[0030] The present invention includes delivering to a subject at least one TIP directed to a reference locus in a tolerizing fashion. In one embodiment, the entire TIP set is delivered to the subject. As described herein, TIPs are delivered in such a way so as minimize, reduce, or eliminate the subject's immune response to a FVIIIrp epitope that includes a reference locus. In one embodiment, administration of the TIPs described herein induces T-cell tolerance. In one embodiment, the administration of the TIPs described herein induces T-cell anergy. In one embodiment, the administration of the TIPs described herein induces abortive T-cell activation. In one embodiment, the TIPs of the present invention are administered to target the natural mechanisms for clearing apoptotic debris. In one embodiment, the TIPs are delivered in such a way so as to be taken up by marginal zone macrophages expressing the macrophage receptor protein MARCO. In one embodiment, the TIPs are delivered in such a way so as to be taken up by immature dendritic cells. In one embodiment, the TIPs are solubilized. In one embodiment, the TIPs are delivered intravenously.

[0031] The TIPs described herein are administered to a subject in association with a carrier. In one embodiment, the TIP is coupled to a carrier to form a TIP-carrier complex. In one embodiment, the TIP is covalently coupled to a carrier molecule. In one embodiment, the TIP is covalently coupled to a carrier molecule using 1-ethyl-3-(3-dimethylaminopropyl)carbodiimide (ECDI). In one embodiment, the carrier is selected from the group consisting of an isologous leukocyte and a micro- or nano-particle. In one embodiment, the micro- or nano-particle is a biodegradable micro- or nano-particle. In one embodiment, the biodegradable micro- or nano-particle is a poly(lactide-co-glycolide)(PLGA) micro- or nano-particle. In one embodiment, the biodegradable micro- or nano-particle is a PLGA particle modified with PEMA (poly[ethylene-co-maleic acid]) as a surfactant to form a PLGA-PEMA micro- or nano-particle. In one embodiment, the PLGA micro- or nano-particle or PLGA-PEMA particle has a size of between about 10 nm to about 5000 nm. In one embodiment, the PLGA or PLGA-PEMA micro- or nano-particle has a size between about 200 nm to about 1000 nm. In one embodiment, the PLGA, PLGA-PEMA micro- or nano-particle has a size of about 400 nm to about 600 nm, and in particular embodiments, about 500 nm. In one embodiment, the micro- or nano-particle is a polystyrene micro- or nano-particle. In one embodiment, the polystyrene micro- or nano-particle has a size of between about 10 nm to about 5000 nm. In one embodiment, the polystyrene micro- or nano-particle has a size between about 200 nm to about 1000 nm. In one embodiment, the polystyrene micro- or nanoparticle has a size of about 400 nm to about 600 nm, and in particular embodiments, about 500 nm.

[0032] In one embodiment, the TIPs described herein are coupled to a PLGA, PLGA-PEMA, PLA, or polystyrene (PS) micro- or nano-particle that is about 200 nm to about 1000 nm in size, about 400 nm to about 600 nm, and in particular about 500 nm, using ECDI.

[0033] In one aspect of the present invention, compositions are provided herein comprising at least one or more TIPs from a TIP set useful for administering to a HA subject in order to minimize an undesired immune response to a FVIIIrp. In one embodiment, composition are provided comprising at least one TIP from a TIP set, wherein the TIP is a result of a missense mutation, an non-synonymous SNP or haplotypic variation, a deletion, an inversion, or a synthetic linker peptide contained in a FVIIIrp, for example a BDD-rFVIIIrp. In one embodiment, compositions are provided comprising at least one TIP of at least 9 amino acids in length, wherein the peptide encompasses a reference locus, identified in the TIP sets identified in Tables 2-103. In one embodiment, a composition comprising at least one TIP of at least 9 amino acids, at least 10 amino acids, at least 11 amino acids, at least 12 amino acids, at least 13 amino acids, at least 14 amino acids, at least 15 amino acids, at least 16 amino acids, at least 17 amino acids, at least 18 amino acids, at least 19 amino acids, at least 20 amino acids, or at least 21 amino acids, and including a reference locus is provided, wherein the reference locus results from a missense mutation, a non-synonymous SNP or haplotypic variation, a deletion, an inversion, or a synthetic linker peptide contained in a rFVIIIrp, for example, a BDD-rFVIIIrp. In one embodiment, a composition comprising at least one TIP of at least 9 amino acids, at least 10 amino acids, at least 11 amino acids, at least 12 amino acids, at least 13 amino acids, at least 14 amino acids, at least 15 amino acids, at least 16 amino acids, at least 17 amino acids, at least 18 amino acids, at least 19 amino acids, at least 20 amino acids, or at least 21 amino acids, and including a reference locus is provided, wherein the peptide is derived from the peptide sequences described in Tables 2-103.

[0034] Compositions comprising at least one TIP comprising at least 9 amino acids comprised from the TIPs in Tables 2-103 are provided. Compositions comprising at least one TIP set comprising at least 9 peptides comprised from the TIP sets in Tables 2-102 are provided. Compositions comprising at least one TIP set comprising at least 5 peptides comprised from the TIP set in Tables 103 are provided.

[0035] The TIPs described herein can be coupled to a carrier. In one embodiment, the peptide is covalently couple to a carrier molecule. In one embodiment, the peptide is covalently coupled to a microparticle. In one embodiment, the TIP is covalently coupled to a microparticle using ECDI. In one embodiment, the microparticle is a PLGA, PLGA-PEMA, PLA, or polystyrene bead of between about 200 nm and about 1000 nm. In one embodiment, the microparticle is about 500 nm. In one embodiment, the composition includes at least 1, 2, 3, 4, 5, 6, 7, 8, 9, 10, 11, 12, 13, 14, 15, 16, 17, 18, 19, 20, or 21 or more peptides. In one embodiment, the composition includes TIPs from more than one TIP set. Alternatively, the TIPs described herein are incorporated into, or encapsulated by, a carrier.

[0036] In one aspect of the present invention, compositions are provided herein comprising at least one TIP set of peptides useful for administering to a HA subject in order to minimize or reduce an undesired immune response to a FVIIIrp. In one embodiment, compositions are provided comprising at least one TIP set, wherein the TIP within the set is a result of a missense mutation, a non-synonymous SNP or haplotypic variation, an inversion, or a synthetic linker in a FVIIIrp. In one embodiment, compositions are provided comprising at least one TIP set identified in Tables 2-103. In one embodiment, a composition comprising at least one TIP set of at least 9 peptides, at least 10 peptides, at least 11 peptides, at least 12 peptides, at least 13 peptides, at least 14 peptides, at least 15 peptides, at least 16 peptides, at least 17 peptides, at least 18 peptides, at least 19 peptides, at least 20 peptides, or at least 21 peptides is provided, wherein the reference locus within the set is a result of a mis sense mutation, an non-synonymous SNP or haplotypic variation, or an inversion. In one embodiment, a composition comprising at least one TIP set of at least 9 peptides, at least 10 peptides, at least 11 peptides, at least 12 peptides, at least 13 peptides, at least 14 peptides, at least 15 peptides, at least 16 peptides, at least 17 peptides, at least 18 peptides, at least 19 peptides, at least 20 peptides, or at least 21 peptides is provided, wherein the TIP set is described in Tables 2-103. In one embodiment, the peptides of the TIP set are coupled to at least one carrier. In one embodiment, the peptides of the TIP set are coupled to one or, alternatively, more than one carrier. In one embodiment, the peptides of the TIP set are covalently coupled to a carrier. In one embodiment, the peptides of the TIP set are covalently coupled to a micro- or nano-particle. In one embodiment, the peptides of the TIP set are covalently coupled to a micro- or nano-particle using ECDI. In one embodiment, the micro- or nano-particle is a PLGA, PLGA-PEMA, PLA, or polystyrene bead of between about 200 nm and about 1000 nm, between about 400 nm and about 600 nm, and, more particularly, around about 500 nm. In one embodiment, the micro- or nano-particle is about 500 nm. In one embodiment, the composition comprises at least one TIP set. In one embodiment, the composition comprises two or more TIP sets. In one embodiment, the composition comprises a set of peptides for each reference locus identified.

[0037] In one embodiment, the TIPs or TIP sets described herein are administered prophylactically to a subject that has not previously been treated with an FVIIIrp. In one embodiment, the TIPs or TIP sets described herein are administered to a subject who is currently undergoing treatment with an FVIIIrp, but has not yet developed inhibitors to the specific FVIIIrp. In one embodiment, the TIPs or TIP sets described herein are administered to a subject concomitantly with the administration of an FVIIIrp. In one embodiment, at least one TIP from a TIP set, or alternatively the entire TIP set, is administered to a subject who has previously been treated with the FVIIIrp. In one embodiment, the TIPs or TIP sets described herein are administered as a tolerizing maintenance dose to a subject who has previously been tolerized to an FVIIIrp. In one embodiment, the TIPs or TIP sets described herein are administered to a subject who has developed inhibitors to the FVIIIrp and has previously undergone standard tolerance induction therapy, for example, a repetitive long-term FVIIIrp infusion. In one embodiment, the TIPs or TIP sets described herein are administered to a subject who has developed inhibitors to an FVIIIrp and is currently undergoing standard tolerance induction therapy, for example, a repetitive long-term FVIIIrp infusion. In one embodiment, the TIPs or TIP sets described herein are administered to a subject who has developed inhibitors to the FVIIIrp and is concomitantly initiating standard tolerance induction therapy, for example, a repetitive long-term FVIIIrp infusion.

[0038] The present invention includes at least the following features:

[0039] 1) methods for the minimization of an undesired immune response and/or induction of immune tolerance to a FVIII replacement product, including but not limited to a rFVIIIrp, in a subject suffering from hemophilia A including determining the amino acid differences between the subject's FVIII and the FVIIIrp to be administered, being administered, or having been administered to the subject, identifying one or more reference locus within the FVIIIrp, wherein the reference locus correlates with an amino acid difference between the sFVIII and the FVIIIrp, identifying a set of TIPs between 9 and 21 peptides, wherein the length of each peptide correlates with the number of peptides in the set, wherein each TIP includes the reference locus and is identical to a contiguous amino acid sequence within the FVIIIrp, and administering at least one or more TIPs, or a at least one or more sets of TIPs, to a subject;

[0040] 2) Compositions and methods for creating TIPs for use in minimizing an undesired immune response and/or inducing immune tolerance to a FVIII replacement product, including but not limited to a rFVIIIrp, in a subject suffering from hemophilia A including determining the amino acid differences between the subject's FVIII and the FVIIIrp to be administered, being administered, or having been administered to the subject, identifying one or more reference locus within the FVIIIrp, wherein the reference locus correlates with an amino acid difference between the sFVIII and the FVIIIrp, creating a set of TIPs comprising between 9 and 21 peptides, wherein the TIP corresponds with a contiguous amino acid sequence within the FVIIIrp, wherein the length of the peptide is directly correlated with the number of peptides in the set, wherein each peptide in the set includes the reference locus, wherein the first peptide of the set comprises a reference locus at its first amino acid position, the second peptide of the set comprises a reference locus at its second amino acid position, and each successive peptide in the set comprises a reference locus at an amino acid position frame-shifted one position downstream from the reference locus position of the preceding peptide, and wherein the last peptide of the set has a reference locus in its last amino acid position;

[0041] 3) Compositions, and methods for minimizing an undesired immune response and/or inducing immune tolerance to a FVIII replacement product, including but not limited to a rFVIIIrp, in a subject suffering from hemophilia A using such compositions, including one or more peptides of at least 9 amino acids long generated from the TIPs identified in Tables 2-103; and,

[0042] 4) Compositions, and methods for minimizing an undesired immune response and/or inducing immune tolerance to a FVIII replacement product, including but not limited to rFVIIIrp, in a subject suffering from hemophilia A using such compositions, including one or more sets of TIPs, wherein each TIP set comprises at least 9 peptides selected from at least the first 9 peptides of one of the TIP sets identified in Tables 2-103.

### BRIEF DESCRIPTION OF THE DRAWINGS

[0043] FIG. 1: Shown are FVII haplotypic variants, distribution in the black and white population, and development of inhibitors associated with replacement FVIII treatment.

[0044] FIG. 2: Schematic of a reference locus identified between an exemplary sFVIII amino acid sequence and a rFVIIIrp, and a TIP set of 9 TIPs, each incorporating the reference locus, of 9 amino acids in length.

[0045] FIG. 3: Schematic of illustrative TIP sets of between 9 amino acids in length to 21 amino acids in length derived from an exemplary reference locus.

### DETAILED DESCRIPTION OF THE INVENTION

### Definitions

[0046] As used throughout, by a “subject” is meant an individual. Thus, the “subject” can include domesticated animals, such as cats, dogs, etc., livestock (e.g., cattle, horses, pigs, sheep, goats, etc.), laboratory animals (e.g., mouse, rabbit, rat, guinea pig, etc.) and birds. In some embodiments, the subject is a mammal such as a primate, for example, a human.

[0047] “Amount effective” and “effective amount” in the context of a composition or dosage form for administration to a subject refers to an amount of the composition or dosage form that produces one or more desired immune tolerizing responses in the subject, for example, the generation of a tolerogenic immune response to a rFVIIIrp immunogenic epitope resulting in the prevention, reduction, or elimination of an immunogenic response to a rFVIIIrp, for example prevention, reduction, or elimination of inhibitors to the rFVIIIrp. Therefore, in some embodiments, an amount effective is any amount of a composition provided herein that produces one or more of these desired immune responses. The amount are one that a clinician believe to have a clinical benefit for a subject in need of rFVIIIrp antigen-specific tolerization.

[0048] Effective amount can involve only reducing the level of an undesired immune response, although in some embodiments, it involves preventing an undesired immune response altogether. Effective amount can also involve delaying the occurrence of an undesired immune response. An amount that is effective can also be an amount of a composition provided herein that produces a desired therapeutic endpoint or a desired therapeutic result. Effective amount result in a tolerogenic immune response in a subject to a rFVIIIrp. The achievement of any of the foregoing are monitored by routine methods.

[0049] In some embodiments of any of the compositions and methods provided, the effective amount is one in which the desired minimization or reduction of an undesired immune response persists in the subject for at least 1 week, at least 2 weeks, at least 1 month, at least 2 months, at least 3 months, at least 4 months, at least 5 months, at least 6 months, at least 9 months, at least 1 year, at least 2 years, at least 5 years, or longer. In other embodiments of any of the compositions and methods provided, the effective amount is one which produces a measurable desired tolerogenic immune response, for example, a measurable decrease in an immune response (e.g., to a rFVIIIrp), for at least 1 week, at least 2 weeks, at least 1 month, at least 2 months, at least 3 months, at least 4 months, at least 5 months, at least 6 months, at least 9 months, at least 1 year, at least 2 years, at least 5 years, or longer.

[0050] Effective amount will depend, of course, on the particular subject being treated; the severity of a condition, disease or disorder; the individual patient parameters including age, physical condition, size and weight; the duration of the treatment; the nature of concurrent therapy (if any); the specific route of administration and like factors within the knowledge and expertise of the health practitioner.

[0051] “Couple” or “Coupled” or “Couples” (and the like) means to chemically associate one entity (for example a moiety) with another. In some embodiments, the coupling is covalent, meaning that the coupling occurs in the context of the presence of a covalent bond between the two entities. In non-covalent embodiments, the non-covalent coupling is mediated by non-covalent interactions including but not limited to charge interactions, affinity interactions, metal coordination, physical adsorption, host-guest interactions, hydrophobic interactions, TT stacking interactions, hydrogen bonding interactions, van der Waals interactions, magnetic interactions, electrostatic interactions, dipole-dipole interactions, and/or combinations thereof. In embodiments, encapsulation is a form of coupling.

[0052] “Derived” means prepared from a material or use of information such as sequence related to a material but is not “obtained” from the material.

[0053] “Dosage form” means a pharmacologically and/or immunologically active material in a medium, carrier, vehicle, or device suitable for administration to a subject.

[0054] “Epitope”, also known as an antigenic determinant, is the part of an antigen that is recognized by the immune system, specifically by, for example, antibodies, B cells, or T cells.

[0055] As used herein, “MHC Class II-restricted epitopes” (or similar derivations) are epitopes that are presented to immune cells by MHC class II molecules found on antigen-presenting cells (APCs), for example, on professional antigen-presenting immune cells, such as on macrophages, B cells, and dendritic cells, or on non-hematopoietic cells, such as hepatocytes.

[0056] “Maintenance dose” refers to a dose that is administered to a subject, after an initial dose has resulted in the minimization or reduction of an undesired immune response in a subject, to sustain a desired tolerogenic response. A maintenance dose, for example, are one that maintains the tolerogenic effect achieved after the initial dose, prevents an undesired immune response in the subject, or prevents the subject becoming a subject at risk of experiencing an undesired immune response, including an undesired level of an immune response. In some embodiments, the maintenance dose is one that is sufficient to sustain an appropriate level of a desired immune response.

[0057] “Pharmaceutically acceptable excipient” means a pharmacologically inactive material used together with the recited peptides and carriers to formulate the inventive compositions. Pharmaceutically acceptable excipients comprise a variety of materials known in the art, including but not limited to saccharides (such as glucose, lactose, and the like), preservatives such as antimicrobial agents, reconstitution aids, colorants, saline (such as phosphate buffered saline), and buffers.

[0058] “Protocol” refers to any dosing regimen of one or more substances to a subject. A dosing regimen may include the amount, frequency and/or mode of administration. In some embodiments, such a protocol may be used to administer one or more compositions of the invention to one or more subjects. Immune responses in these subjects can then be assessed to determine whether or not the protocol was effective in reducing an undesired immune response or generating a desired immune response (e.g., the promotion of a tolerogenic effect). Any other therapeutic and/or prophylactic effect may also be assessed instead of or in addition to the aforementioned immune responses. Whether or not a protocol had a desired effect are determined using any of the methods provided herein or otherwise known in the art. For example, a blood sample may be obtained from a subject to which a composition provided herein has been administered according to a specific protocol in order to determine whether or not specific inhibitors to FVIII were minimized, reduced, generated, or prevented. Useful methods for detecting the presence and/or number of inhibitors include ELISA assays, ELISPOT assays, and other similar type assays.

[0059] “Haplotype” refers to a combination of DNA sequences that are closely linked on one chromosome and are commonly inherited together. The gene encoding FVIII (F8) is polymorphic in the human population, yet there are four common non-synonymous single nucleotide polymorphisms (nsSNPs), that together with two infrequent nsSNPs define eight haplotypes of the F8 gene, referred to as haplotype (H)1, H2, H3, H4, H5, H6, H7, and H8. (Viel, K. R. et al. A sequence variation scan of the coagulation factor VIII (FVIII) structural gene and associations with plasma FVIII activity levels. Blood 109, 3713-3724 (2007); Howard, T. E. et al. Haemophilia management: time to get personal? Haemophilia 17, 721-728 (2011); Viel, K. R. et al. Inhibitors of factor VIII in black patients with hemophilia. N Engl J Med 360, 1618-1627 (2009))

[0060] “B-domain deleted FVIII” (BDD-FVIII or BDDFVIII) or the like refers to a protein that by virtue of recombinant genetic engineering comprises a FVIII protein in which the B domain of FVIII or some portion of the B domain of FVIII has been removed from the sequence of FVIII resulting in a functional recombinant FVIII protein. (Toole, J. J. et al. A large region (approximately equal to 95 kDa) of human factor VIII is dispensable for in vitro procoagulant activity. Proc Natl Acad Sci USA 83, 5939-5942 (1986)).

[0061] “Synthetic linker” refers to a sequence of DNA that by virtue of recombinant DNA techniques is introduced into the gene-encoding sequence of a gene, which DNA sequence is not present in the naturally-occurring sequence of the gene, and which DNA sequence serves the purpose of tying together an upstream and downstream portion of the gene and is necessitated when using recombinant DNA techniques to delete a domain or a portion of a domain of the gene.

[0062] “Single nucleotide polymorphism” (SNP) refers to a variation of one nucleotide (Adenine, Guanine, Cytosine, or Thymine) in the DNA sequence on a chromosome in the genome of an individual that differs from the nucleotide in the DNA sequence of either another chromosome of that individual or a chromosome of another individual.

[0063] “Non-synonymous single nucleotide polymorphism” (nsSNP or ns-SNP) refers to a SNP in the gene-encoding region of a chromosome that by the nature of its position in the gene-encoding region of a chromosome yields a change in the amino acid sequence of the protein encoded by the gene.

[0064] “Amino acid reference locus (AARL)” refers to a position within the FVIIIrp (the amino acid reference locus or AARL in the context of 1-2332 possible positions for wild type FVIII) that serves as a reference point or points for the preparation of a set or sets of tolerance inducing peptides or TIPS that may incorporate T-cell epitopes capable of inducing immune tolerance of, or the prevention, reduction, or elimination of anti FVIII inhibitor development by the subject to an FVIIIrp. An AARL occurs at a locus where there is a structural difference between the FVIIIrp and the sFVIII. The difference may arise due to haplotypic variance between the FVIIIrp and sFVIII, a mutation in the sFVIII, a private polymorphism in the sFVIII or another structural anomaly in the sFVIII. The first peptide in a TIP set where each peptide has length X, will be an amino acid residue which is identical to the AARL. In such as a TIP set, the second TIP will be derived so that the length of the TIP remains X, but the AARL locus is shifted one position upstream with reference to the FVIIIrp, the third TIP will be derived so that the length of the TIP remains X but the AARL locus is shifted two positions upstream of its original locus with reference to the FVIIIrp and so forth. TIP sets so derived will collectively overlap a contiguous portion of the rFVIIIrp sequence spanning a length of 2x−1 residues.

[0065] Throughout this application, various publications are referenced. The disclosures of these publications in their entireties are hereby incorporated by reference into this application in order to more fully describe the state of the art to which this pertains. The references disclosed are also individually and specifically incorporated by reference herein for the material contained in them that is discussed in the sentence in which the reference is relied upon.

[0066] The present invention may be understood more readily by reference to the following detailed description of embodiments of the invention and to the Figures and their previous and following description.

[0067] General

[0068] Blood clotting begins when platelets adhere to the cut wall of an injured blood vessel at a lesion site. Subsequently, in a cascade of enzymatically regulated reactions, soluble fibrinogen molecules are converted by the enzyme thrombin to insoluble strands of fibrin that hold the platelets together in a thrombus. At each step in the cascade, a protein precursor is converted to a protease that cleaves the next protein precursor in the series. Co-factors are required at most of the steps. FVIII circulates as an inactive precursor in blood, bound tightly and non-covalently to von Willebrand factor. FVIII is proteolytically activated by thrombin or factor Xa, which dissociates it from von Willebrand factor and activates its procoagulant function in the cascade. In its active form, the protein factor VIIIa is a cofactor that increases the catalytic efficiency of factor IXa toward factor X activation by several orders of magnitude.

[0069] People with deficiencies in FVIII or inhibitors against FVIII who are not treated with FVIII suffer uncontrolled internal bleeding that may cause a range of serious symptoms, from inflammatory reactions in joints to early death. Severe hemophiliacs, who number about 10,000 in the United States, can be treated with infusion of plasma derived (pd) or recombinant FVIII, which will restore the blood's normal clotting ability if administered with sufficient frequency and concentration. The classical definition of FVIII is that substance present in normal blood plasma that corrects the clotting defect in plasma derived from individuals with hemophilia A.

[0070] The development of FVIII inhibitors has been, next to HIV and hepatitis, the most serious complication of hemophilia therapy. Although the recent production of highly purified and genetically engineered FVIII products has decreased the risk of these infections, the development of inhibitors remains a major therapeutic challenge. Because affected patients, usually children, are rendered resistant to conventional replacement therapy, control of hemostasis becomes difficult, resulting in substantial morbidity. Inhibitors (alloantibodies) are IgG antibodies, mostly of the IgG4 subclass, that bind to replacement FVIII and interfere with its pro-coagulant function. Clinically, patients with inhibitors are classified into high and low responders according to the strength of the anamnestic response they experience when they are re-exposed to FVIII. The goals of therapy in these patients are to control severe acute bleeding and to eradicate the inhibitor.

[0071] Another strategy for coping with inhibitors is to attempt to induce immune tolerance (ITI) to a particular FVIIIrp. ITI involves frequent exposure to the FVIIIrp over extended periods of time and is not always successful. The large amounts of factor needed for successful ITI render it cost prohibitive in many circumstances.

[0072] Our current understanding suggests that an immunogenic CD4+ T-cell response to an exogenous protein requires that: (i) at least one of the peptides derived by proteolytic processing of the infused protein must be foreign (non-self) to the patient; (ii) at least one of the distinct isomers of class-II human-leukocyte antigens (HLA-II) comprising the subject's individual MHC-class-II (MHC-II) repertoire must be able to bind a foreign peptide with sufficient affinity and stability so that it can be presented by the antigen-presenting cells (APCs); (iii) at least one of the subject's subpopulations of CD4+ T cells has a T-cell antigen receptor (TCR) capable of functionally productive binding to an HLA-II/foreign-FVIII-peptide complex; and (iv) the above requirements occur in the presence of danger signals that induce expression of co-stimulatory molecules which provide a second signal to the T cells thereby driving the activation of the T cells.

[0073] By utilizing the same MHC class II peptides that induce an immune response, however, it is possible to induce long-term T-cell tolerance and mediate the activity of important immune cells such as regulatory T-cell, by inducing T-cell anergy and T-cell abortive activation in response to specific FVIIIrp epitopes. The present invention provides for the administration of tolerogenic peptides (termed tolerizing amino acids or TIPs) or sets of TIPs to a subject suffering from Hemophilia A in order to prevent, minimize, reduce, or eliminate the development of inhibitors in a subject who will receive, is receiving, or has received a recombinant FVIII replacement product, wherein TIPs are based on amino acid differences existing between the subject's endogenous FVIII protein and the recombinant FVIII replacement product. At least one TIP from a set of TIPs is administered, or alternatively the entire TIP set is administered, wherein each set of TIPs comprises overlapping peptides based on an amino acid difference between the amino acid sequence of the sFVIII and the FVIIIrp. In creating the set of TIPs of the present invention, a specific differing sFVIII amino acid is identified and the corresponding FVIIIrp positional equivalent wild-type amino acids (i.e., the “reference locus”) is used to create a set of between about 9 to 22 overlapping peptides, each containing a reference locus, for each particular reference locus identified, wherein each set of overlapping peptides collectively span a FVIIIrp amino acid sequence both upstream and downstream of the reference locus. Some embodiments provide for the administration of one or more of the overlapping TIPs, and in some embodiments the entire TIP set, from each TIP set in order to prevent or limit the development of, or minimize, reduce, or eliminate the existence of, inhibitors to the specific rFVIIIrp through the induction of a tolerogenic immune response.

[0074] Comparing sFVIII Amino Acid Sequence with rFVIIIrp Amino Acid Sequence

[0075] Current FVIII replacement therapies include the infusions of recombinant FVIII replacement products (rFVIIIrp) and, in some circumstance, plasma derived FVIII replacement products (pdFVIIIrp). rFVIIIrp is a biosynthetic blood coagulant prepared using recombinant DNA, and is structurally similar to endogenous wild-type human FVIII and produces the same biological effect. pdFVIIIrp is derived from pooled blood donations. Due to genetic variables within a subject including the individual's specific F8 mutation type, background FVIII haplotype, and HLA haplotype, however, the FVIIIrp mismatched amino acid may induce an immune response in the subject receiving the FVIIIrp, resulting in the development of inhibitors and the reduction in efficiency of the particular FVIIIrp. By determining the subject's endogenous FVIII protein amino acid sequence, and comparing it to the known amino acid sequence of FVIIIrp, for example a rFVIIIrp, the subject will receive, is receiving, or has received, amino acid differences between the sFVIII and FVIIIrp are identified, the corresponding locus of the particular amino acid difference in the sFVIII mapped (i.e., the reference locus), and sets of peptides based on the differences are created, wherein one or more peptides from each set, and in one embodiment the entire set, are administered in an effective amount to induce tolerance in the subject to at least one reference locus containing epitope.

[0076] FVIII is synthesized in the liver and the primary translation product of 2332 amino acids undergoes extensive post-translational modification, including N- and O-linked glycosylation, sulfation, and proteolytic cleavage. The latter event divides the initial multi-domain protein (A1-A2-B-A3-C1-C2) into a heavy chain (A1-A2-B) and a light chain (A3-C1-C2) and the protein is secreted as a two-chain molecule associated through a metal ion bridge (Lenting et al., The life cycle of coagulation FVIII in view of its structure and function. Blood 1998; 92: 3983-96).

[0077] Over 2100 unique mutations have been identified in the human F8 gene, with over 980 of them being missense mutations, i.e., a point mutation wherein a single nucleotide is changed, resulting in a codon that codes for a different amino acid than its wild-type counterpart (see HAMSTeRS Database: http://hadb.org.uk/WebPages/PublicFiles/MutationSummary.htm).

[0078] In one aspect of the present invention, differences between a sFVIII and a FVIIIrp are identified and a set of tolerogenic peptides as described herein are derived. In one embodiment, the FVIIIrp is a rFVIIIrp. rFVIIIrp amino acid sequences are well known in the art and are all based on variants of functional wild-type FVIII proteins. The wild-type FVIII protein is 2332 amino acids in length, preceded by a 19 amino acid signal sequence which is cleaved prior to secretion. The FVIII wild-type amino acid sequence (SEQ ID NO: 1) without the signal sequence is provided for in Table 1, and forms the basis for the positioning or mapping of the reference loci described herein.

TABLE 1
Human Factor VIII Wild-Type Amino Acid Sequence (SEQ ID NO: 1)

```
                10 20 30 40 50 60
ATRRYYLGAV ELSWDYMQSD LGELPVDARF PPRVPKSFPF NTSVVYKKTL FVEFTDHLFN
                70 80 90 100 110 120
IAKPRPPWMG LLGPTIQAEV YDTVVITLKN MASHPVSLHA VGVSYWKASE GAEYDDQTSQ
              130 140 150 160 170 180
REKEDDKVFP GGSHTYVWQV LKENGPMASD PLCLTYSYLS HVDLVKDLNS GLIGALLVCR
              190 200 210 220 230 240
EGSLAKEKTQ TLHKFILLFA VFDEGKSWHS ETKNSLMQDR DAASARAWPK MHTVNGYVNR
              250 260 270 280 290 300
SLPGLIGCHR KSVYWHVIGM GTTPEVHSIF LEGHTFLVRN HRQASLEISP ITFLTAQTLL
              310 320 330 340 350 360
MDLGQFLLFC HISSHQHDGM EAYVKVDSCP EEPQLRMKNN EEAEDYDDDL TDSEMDVVRF
              370 380 390 400 410 420
DDDNSPSFIQ IRSVAKKHPK TWVHYIAAEE EDWDYAPLVL APDDRSYKSQ YLNNGPQRIG
              430 440 450 460 470 480
RKYKKVRFMA YTDETFKTRE AIQHESGILG PLLYGEVGDT LLIIFKNQAS RPYNIYPHGI
              490 500 510 520 530 540
TDVRPLYSRR LPKGVKHLKD FPILPGEIFK YKWTVTVEDG PTKSDPRCLT RYYSSFVNME
              550 560 570 580 590 600
RDLASGLIGP LLICYKESVD QRGNQIMSDK RNVILFSVFD ENRSWYLTEN IQRFLPNPAG
              610 620 630 640 650 660
VQLEDPEFQA SNIMHSINGY VFDSLQLSVC LHEVAYWYIL SIGAQTDFLS VFFSGYTFKH
              670 680 690 700 710 720
KMVYEDTLTL FPFSGETVFM SMENPGLWIL GCHNSDFRNR GMTALLKVSS CDKNTGDYYE
              730 740 750 760 770 780
DSYEDISAYL LSKNNAIEPR SFSQNSRHPS TRQKQFNATT IPENDIEKTD PWFAHRTPMP
              790 800 810 820 830 840
KIQNVSSSDL LMLLRQSPTP HGLSLSDLQE AKYETFSDDP SPGAIDSNNS LSEMTHFRPQ
              850 860 870 880 890 900
LHHSGDMVFT PESGLQLRLN EKLGTTAATE LKKLDFKVSS TSNNLISTIP SDNLAAGTDN
              910 920 930 940 950 960
TSSLGPPSMP VHYDSQLDTT LFGKKSSPLT ESGGPLSLSE ENNDSKLLES GLMNSQESSW
              970 980 990 1000 1010 1020
GKNVSSTESG RLFKGKRAHG PALLTKDNAL FKVSISLLKT NKTSNNSATN RKTHIDGPSL
            1030 1040 1050 1060 1070 1080
LIENSPSVWQ NILESDTEFK KVTPLIHDRM LMDKNATALR LNHMSNKTTS SKNMEMVQQK
            1090 1100 1110 1120 1130 1140
KEGPIPPDAQ NPDMSFFKML FLPESARWIQ RTHGKNSLNS GQGPSPKQLV SLGPEKSVEG
            1150 1160 1170 1180 1190 1200
QNFLSEKNKV VVGKGEFTKD VGLKEMVFPS SRNLFLTNLD NLHENNTHNQ EKKIQEEIEK
            1210 1220 1230 1240 1250 1260
KETLIQENVV LPQIHTVTGT KNFMKNLFLL STRQNVEGSY DGAYAPVLQD FRSLNDSTNR
            1270 1280 1290 1300 1310 1320
TKKHTAHFSK KGEEENLEGL GNQTKQIVEK YACTTRISPN TSQQNFVTQR SKRALKQFRL
            1330 1340 1350 1360 1370 1380
PLEETELEKR IIVDDTSTQW SKNMKHLTPS TLTQIDYNEK EKGAITQSPL SDCLTRSHSI
            1390 1400 1410 1420 1430 1440
PQANRSPLPI AKVSSFPSIR PIYLTRVLFQ DNSSHLPAAS YRKKDSGVQE SSHFLQGAKK
            1450 1460 1470 1480 1490 1500
NNLSLAILTL EMTGDQREVG SLGTSATNSV TYKKVENTVL PKPDLPKTSG KVELLPKVHI
            1510 1520 1530 1540 1550 1560
YQKDLFPTET SNGSPGHLDL VEGSLLQGTE GAIKWNEANR PGKVPFLRVA TESSAKTPSK
            1570 1580 1590 1600 1610 1620
LLDPLAWDNH YGTQIPKEEW KSQEKSPEKT AFKKKDTILS LNACESNHAI AAINEGQNKP
            1630 1640 1650 1660 1670 1680
EIEVTWAKQG RTERLCSQNP PVLKRHQREI TRTTLQSDQE EIDYDDTISV EMKKEDFDIY
            1690 1700 1710 1720 1730 1740
DEDENQSPRS FQKKTRHYFI AAVERLWDYG MSSSPHVLRN RAQSGSVPQF KKVVFQEFTD
            1750 1760 1770 1780 1790 1800
GSFTQPLYRG ELNEHLGLLG PYIRAEVEDN IMVTFRNQAS RPYSFYSSLI SYEEDQRQGA
            1810 1820 1830 1840 1850 1860
EPRKNFVKPN ETKTYFWKVQ HHMAPTKDEF DCKAWAYFSD VDLEKDVHSG LIGPLLVCHT
            1870 1880 1890 1900 1910 1920
NTLNPAHGRQ VTVQEFALFF TIFDETKSWY FTENMERNCR APCNIQMEDP TFKENYRFHA
            1930 1940 1950 1960 1970 1980
INGYIMDTLP GLVMAQDQRI RWYLLSMGSN ENIHSIHFSG HVFTVRKKEE YKMALYNLYP
            1990 2000 2010 2020 2030 2040
GVFLTVEMLP SKAGIWRVEC LIGEHLHAGM STLFLVYSNK CQTPLGMASG HIRDFQITAS
            2050 2060 2070 2080 2090 2100
GQYGQWAPKL ARLHYSGSIN AWSTKEPFSW IKVDLLAPMI IHGIKTQGAR QKFSSLYISQ
            2110 2120 2130 2140 2150 2160
FIIMYSLDGK KWQTYRGNST GTLMVFFGNV DSSGIKHNIF NPPIIARYIR LHPTHYSIRS
            2170 2180 2190 2200 2210 2220
TLRMELMGCD LNSCSMPLGM ESKAISDAQI TASSYFTNMF ATWSPSKARL HLQGRSNAWR
            2230 2240 2250 2260 2270 2280
PQVNNPKEWL QVDFQKTMKV TGVTTQGVKS LLTSMYVKEF LISSSQDGHQ WTLFFQNGKV
            2290 2300 2310 2320 2330
KVFQGNQDSF TPVVNSLDPP LLTRYLRIHP QSWVHQIALR MEVLGCEAQD LY
```

[0079] The human F8 gene is polymorphic and encodes several structurally distinct FVIII proteins referred to as haplotypes. Sequencing studies of the F8 gene have revealed four common nonsynonymous-single-nucleotide polymorphisms (nsSNPs) that, together with two infrequent ns-SNPs, encode eight distinct wild-type FVIII proteins referred to as haplotype H1, H2, H3, H4, H5, H6, H7, and H8. Seven of the variants—H1, H2, H3, H4, H5, H7, and H8—their associated nsSNP, their distribution in black and white populations, and inhibitor development are illustrated in FIG. 1.

[0080] The amino acid sequence of the H1 wild-type variant is provided for in Table 1. All currently available rFVIIIrp are based on either the H1 or H2 haplotype variant. Commercially available rFVIIIrp and their corresponding haplotype variant and corresponding ns-SNP location are provided for in FIG. 1, and include the H1 variants Kogenate® (Bayer) and Helixate® (ZLB Behring), the H2 variants Recombinate® (Baxter) and Advate® (Baxter), and the H1/H2 variant B-domain deleted Refacto® (Pfizer) and Xyntha® (Pfizer). The present invention, however, is not limited to the determination of reference loci contained in the commercially available products above, but can be applied to any FVIIIrp, including human/porcine hybrid rFVIIIrp, porcine rFVIIIrp, and alternative haplotype recombinant FVIII replacement products such as those identified in WO 2006/063031, which is incorporated by reference herein, and pdFVIIIrp. As previously described pdFVIIIrp are pooled from blood donors and consist of FVIII products primarily of the H1 haplotype.

[0081] Hemophilia A is caused by loss-of-function mutations in the F8 gene. The F8 gene is located on the X-chromosome and comprises 26 exons separated by 25 non-coding introns. Differences between a sFVIII and a FVIIIrp can result from, for example, missense mutations in the subject's F8 gene, nonsynonymous single-nucleotide polymorphisms (nsSNPs) (both well-known and “private” or individualized) or haplotypic variations between the sFVIII and FVIIIrp, inversions, for example intron 1 or 22 inversions, synthetic peptide inclusion due to B-domain deletions in the BDD-rFVIIIrp, and the like. Currently, over 2,100 unique mutations have been identified relating to HA.

[0082] Because the amino acid sequence of available rFVIIIrp are known, and differences in pdFVIIIrp are determined, differences (or mismatches) between the subject's endogenous FVIII protein sequence and FVIIIrp are readily identifiable using common techniques known in the art. The reference locus of the FVIIIrp (that is, the amino acid difference contained in the FVIIIrp) of the TIPs described herein can positionally correlate with an amino acid substitution in the sFVIII caused by a missense mutation in the subject's F8 gene. Identification of a subject's missense mutation are readily made by using techniques known in the art. For example, DNA from the subject are extracted from leukocytes in whole blood and all the endogenous coding regions and splice junctions of the factor VIII gene are analyzed by restriction analysis, direct DNA sequence analysis, Denaturing Gradient Gel Electrophoresis (DGGE), Chemical Mismatch Cleavage (CMC), and Denaturing High Performance Liquid Chromatography (DHPLC) (see, for example: Higuchi et al., Characterization of mutations in the factor VIII gene by direct sequencing of amplified genomic DNA. Genomics 1990: 6(1); 65-71, Schwaab et al. Mutations in hemophilia A. Br J Haematol 1993; 83: 450-458; Schwaab et al. Factor VIII gene mutations found by a comparative study of SSCP, DGGE, and CMC and their analysis on a molecular model of factor VIII protein. Hum Genet 1997; 101: 323-332; Oldenburg et al. Evaluation of DHPLC in the analysis of hemophilia A. J Biochem Biophys Methods 2001; 47: 39-51). Tables 2-87 identifies a number of known missense mutations, the resulting amino acid substitutions, and the corresponding rFVIIIrp reference loci (bolded and underlined). Additional missense mutations from which TIPs containing reference loci contemplated herein are directed to are identifiable through the HAMSTeRS database (Haemophilia A Mutation, Structure, Test and Resource Site) (http://hadb.org.uk/), which includes over 980 unique missense mutations. Tables 2-87 identify TIPs directed to a number of known missense mutations, wherein the reference locus of the rFVIIIrp correlating with each mis sense mutation is bolded and underlined.

[0083] Non-synonymous Single Nucleotide Polymorphism (nsSNP) differences between a sFVIII and a FVIIIrp can result in the development of inhibitors in certain subjects. For example, subjects with H3 or H4 background haplotypes (prevalent in the population of blacks of African descent) have a higher observable prevalence of inhibitor development than patients with H1 and H2 haplotypes, likely due to the fact that the only available rFVIIIrp products are of the H1 and H2 haplotype and the predominate haplotype in pdFVIIIrp the H1 haplotype. The reference locus of the TIPs described herein can positionally correlate with a nsSNP difference contained in the sFVIII. For example, the nsSNP variants of the commercially available rFVIIIrp are readily identified. For example, FIG. 1 describes the nsSNP variants for a number of commercially available rFVIIIrp. In one embodiment, the nsSNP difference is a result of a known nsSNP. In one embodiment, the nsSNP difference is a result of a rare or previously unknown nsSNP within the sFVIII. The identification of nsSNPs is well known in the art (see, for example: Viel at al. Inhibitors of Factor VIII in Black Patients with Hemophilia. N Engl J Med 2009; 360(16): 1618-1627; WO 2006/063031, both incorporated herein by reference). In one embodiment, the reference locus is a result of a nsSNP difference at amino acid 113 in the FVIIIrp. In one embodiment, the difference at amino acid 113 in the FVIIIrp is a glutamic acid. In one embodiment, the reference locus is a result of a nsSNP difference at amino acid 334 in the FVIIIrp. In one embodiment, the difference at amino acid 334 in the FVIIIrp is a glutamine. In one embodiment, the reference locus is a result of a nsSNP difference at amino acid 387 in the FVIIIrp. In one embodiment, the difference at amino acid 387 in the FVIIIrp is a alanine. In one embodiment, the reference locus is a result of a nsSNP difference at amino acid 484 in the FVIIIrp. In one embodiment, the difference at amino acid 484 in the FVIIIrp is an arginine. In one embodiment, the reference locus is a result of a nsSNP difference at amino acid 776 in the FVIIIrp. In one embodiment, the difference at amino acid 776 in the FVIIIrp is an arginine. In one embodiment, the reference locus is a result of a nsSNP difference at amino acid 1107 in the FVIIIrp. In one embodiment, the difference at amino acid 1107 in the FVIIIrp is an arginine. In one embodiment, the reference locus is a result of a nsSNP difference at amino acid 1241 in the FVIIIrp. In one embodiment, the difference at amino acid 1241 in the FVIIIrp is an aspartic acid. In one embodiment, the difference at amino acid 1241 is a glutamic acid. In one embodiment, the reference locus is a result of a nsSNP difference at amino acid 1260 in the FVIIIrp. In one embodiment, the difference at amino acid 1260 in the FVIIIrp is an arginine. In one embodiment, the reference locus is a result of a nsSNP difference at amino acid 1462 in the FVIIIrp. In one embodiment, the difference at amino acid 1462 in the FVIIIrp is a lysine. In one embodiment, the reference locus is a result of a nsSNP difference at amino acid 1668 in the FVIIIrp. In one embodiment, the difference at amino acid 1668 in the FVIIIrp is an isoleucine. In one embodiment, the reference locus is a result of a nsSNP difference at amino acid 2004 in the FVIIIrp. In one embodiment, the difference at amino acid 2004 in the FVIIIrp is a glutamic acid. In one embodiment, the reference locus is a result of a nsSNP difference at amino acid 2223 in the FVIIIrp. In one embodiment, the difference at amino acid 2223 in the FVIIIrp is a valine. In one embodiment, the reference locus is a result of a nsSNP difference at amino acid 2238 in the FVIIIrp. In one embodiment, the difference at amino acid 2238 in the FVIIIrp is a methionine. In one embodiment, the reference locus is a result of a nsSNP difference at amino acid 2292 in the FVIIIrp. In one embodiment, the difference at amino acid 2292 in the FVIIIrp is a proline. Tables 88-101 identifies a number of known nsSNPs and their corresponding amino acid substitutions in differing haplotypes Tables 88-101 also identifies TIPs directed to a number of known nsSNPs, wherein the reference locus correlating with each nsSNP is bolded and underlined.

[0084] Molecular genetic studies have shown that development of inhibitors to factor VIII replacement products occurs most frequently in patients with severe hemophilia due to major gene lesions including inversions. In one embodiment, the reference locus of the TIPs describe herein positionally correlates with a differing amino acid sequence within the sFVIII caused by an inversion of intron 1 or intron 22. In one embodiment, the inversion is an inversion of intron 1. In one embodiment, the inversion is an inversion of intron 22. The identification of inversions is well known in the art (see, for example, Viel at al. Inhibitors of Factor VIII in Black Patients with Hemophilia. N Engl J Med 2009; 360(16): 1618-1627).

[0085] The reference locus of a TIP can positionally correlate with a differing amino acid sequence within the sFVIII caused by an inversion of intron 22. Generally, subjects with intron 22 inversion express the entire FVIII intracellularly, albeit on two separate polypeptides. Importantly, another gene, F8B, is also generally expressed in both normal and HA subjects. The expression product of the F8B gene, FVIIIB, has sequence identity with a portion of the C1 domain and the entire C2 domain of FVIII. The presence of this FVIIIB polypeptide is important from a tolerance standpoint as it serves as a source for any T cells epitope or B cell epitopes needed to support processes that occur in the thymus (T cell clonal deletion) and spleen (B cell anergy) to achieve central tolerance. The expression product of F8I22I starts at residue 1 and ends at residue 2124. The polypeptide expressed by the F8B begins at residue 2125 and ends at residue 2332. Accordingly subjects having the F8I22I have the requisite FVIII material to yield one or more FVIII peptides ending at or before residue 2124, the last amino acid encoded by exon 22, or beginning at or after residue 2125, the first amino acid encoded by exon 23. Any potential T cell epitope within such a peptide would be expected to be recognized as a self-antigen and not be immunogenic in the subject. Peptides spanning the junction between residues 2124 and 2125, if proteolyzed from a rFVIIIrp and presented by MHC class II molecules, however, would be “foreign” and potentially immunogenic T cell epitopes in an F8I22I subject. Because of this, all subjects having F8I22I have similar reference loci across residues 2124Val and 2125Met with respect to all currently available FVIIIrp. Table 102 identifies TIPs directed to this FVIIIrp MV reference locus (bolded and underlined).

[0086] The reference locus of a TIP can positionally correlate with a differing amino acid sequence within the sFVIII caused by the removal of the B-domain from a BDD-rFVIIIrp. In certain BDD-rFVIIIrp, a deletion of 894 internal codons and splicing codons 762 and 1657 creates a FVIII product containing 1438 amino acids. The BDD-rFVIIIrp contains a synthetic junctional 14-peptide sequence SFS-QNPPVLKRHQR formed by covalent attachment of the three N-terminal most residues of the B-domain, S⁷⁴¹F⁷⁴²S⁷⁴³, to the 11 C-terminal-most residues Q¹⁶³⁸N¹⁶³⁹P¹⁶⁴⁰P¹⁶⁴¹V¹⁶⁴²L¹⁶⁴³K¹⁶⁴⁴R¹⁶⁴⁵H¹⁶⁴⁶Q¹⁶⁴⁷R¹⁶⁴⁸. This synthetic linker creates 11 unique peptides across a 15 amino acid sequence within the BDD-rFVIIIrp, which have potential immunogenicity. Table 103 identifies TIPs directed to this BDD-rFVIIIrp synthetic linker wherein the rFVIIIrp reference locus is bolded and underlined.

[0087] Creation of Tolerance Inducing Peptide Sets

[0088] The present invention includes the identification of TIP sets directed to at least one reference locus, and compositions and methods of use of such TIP sets. Once the subject's endogenous FVIII amino acid sequence and rFVIIIrp amino acid sequence are compared and specific reference loci identified, sets of TIPs encompassing at least one reference locus are identified. Each peptide within a set contains a reference locus. The peptides within a TIP set are identical to a contiguous portion of the FVIIIrp, and, in certain embodiments, similar to the sFVIII except generally for the reference locus.

[0089] In general, each peptide of a TIP set will overlap a contiguous portion of the FVIIIrp across 2X−1 amino acids, where X is the length of the peptides contained in the set. Furthermore, the contiguous FVIIIrp amino acid sequence overlapped by the peptides will include X−1 amino acid residues upstream and X−1 amino acid residues downstream from the reference locus position within the FVIIIrp, wherein X is the length of the peptides contained in the set.

[0090] A further understanding of the identification of TIP sets contemplated herein may be gained by reference to, for illustrative purposes, FIGS. 2 and 3. For example, a subject may have a single missense mutation within their F8 gene resulting in a single amino acid substitution at a specific position within the endogenous FVIII protein that renders such protein defective. For example, the subject, due to a missense mutation, may have an amino acid substitution from Leu (the wild-type amino acid) to Pro (the missense substituted amino acid) at amino acid 50 within his endogenous FVIII protein. Comparatively, the FVIIIrp will not have that same substituted amino acid at this position, instead having the wild-type amino acid Leu at that position. Thus, comparing the sFVIII protein amino acid sequence (SEQ ID NO: 3) to the FVIIIrp (SEQ ID NO: 2) in this stance will identify Leu at amino acid 50 within the FVIIIrp as the reference locus.

[0091] Referring to FIG. 2, once the Leu at amino acid 50 is identified as reference locus, a set of 9 to 21 peptides ranging from 9 to 21 amino acids in length are identified, wherein each peptide in the set will contain the reference locus. Generally, the number of peptides identified in a TIP set is directly proportional to the selected peptide length. For example, if the TIP set is 9 amino acids in length, the set will contain 9 peptides, if the TIP set is 10 amino acids in length, the set will contain 10 peptides, and so forth. For illustrative purposes, a set of 9 peptides each of 9 amino acids in length are described in FIG. 2. Each peptide is identical to an amino acid portion of the FVIIIrp and, in the illustrative example, nearly identical to the homologous portion of the subject's endogenous FVIII protein, except at the reference locus. The first peptide of the set will contain the reference locus Leu in place of the subject's substituted amino acid Pro in its first position. In the example illustrated in FIG. 2, the first peptide in the set will have the sequence LFVEFTDHL (SEQ ID NO:4) and each successive peptide of the set will have the reference locus in a single upstream frame-shift position, so that that reference locus will be in position 2 of peptide 2 (TLFVRFTDH, SEQ ID NO:5), position 3 of peptide 3 (KTLFVEFTD, SEQ ID NO:6), and so, with the last peptide of the set having the reference locus in its last position (TSVVTKKTL, SEQ ID NO:12).

[0092] The peptides within a TIP set are identical to a contiguous portion of the FVIIIrp, and largely similar to the sFVIII, except generally for the reference locus. Each peptide will overlap a contiguous portion of the FVIIIrp across 2X−1 amino acids, where X is the length of the peptides contained in the set. For example, in the example illustrated in FIG. 2, each peptide illustrated is identical to a 9 amino acid portion of the FVIIIrp. Furthermore, the contiguous FVIIIrp amino acid sequence overlapped by the set of reference locus containing peptides is 2x−1 amino in length or 2(9)−(1)=17 amino acids. In addition, the contiguous FVIIIrp amino acid sequence overlapped will include X−1 amino acid residues upstream and X−1 amino acid residues downstream from the reference locus position within the FVIIIrp, wherein X is the length of the peptides contained in the set. In the example illustrated in FIG. 2, the amino acid sequence overlapped includes (9)−1=8 amino acids upstream of the reference locus Leu and (9)−(1) amino acids downstream of the reference locus Leu, so that the contiguous FVIIIrp amino acid sequence overlapped includes the 17 amino acid sequence TSVVYKKTLFVEFTDHL (SEQ ID NO: 13) corresponding to amino acids 42 to 58 of the FVIIIrp.

[0093] As previously described, the peptides identified in a TIP set are from about 9 amino acids in length to about 21 amino acids in length. The length of each peptide within each TIP set is generally the same, that is, all peptides within the TIP set will be the same amino acid length. In one embodiment, the length of the peptides within a particular TIP set is between about 9 amino acids and 21 amino acids. In one embodiment, the length of the peptides within a particular TIP set is at least 9 amino acids, 10 amino acids, 11 amino acids, 12 amino acids, 13 amino acids, 14 amino acids, 15 amino acids, 16 amino acids, 17 amino acids, 18 amino acids, 19 amino acids, 20 amino acids, 21 amino acids. In one embodiment, the length of the peptides within a particular TIP set is 9 amino acids. In one embodiment, the length of the peptides within a particular TIP set is 15 amino acids. In one embodiment, the length of the peptides within a particular TIP set is 17 amino acids. In one embodiment, the length of the peptides within a particular TIP set is 21 amino acids.

[0094] In some embodiments, the length of the peptides in the TIP set are sufficient to facilitate binding to a subject's class II human-leukocyte antigens comprising the subject's individual MHC-class II repertoire. The peptide length compares with that of naturally processed class II restricted epitopes (9 to 14 residues). Extra residues at either end of a CD4+ epitope sequence do not affect its attachment to the class II molecule binding cleft, which is open at both ends. Utilizing overlapping TIP sets of sizes greater than the MHC-II processing length, for example 15 amino acids, 16 amino acids, 17, amino acids, 18 amino acids, 19 amino acids, 20 amino acids, or 21 amino acids, reduces the risk of missing epitopes broken between peptides. In some embodiments, TIP sets of amino acids of length 15, 16, 17, 18, 19, 20, or 21 amino acids are contemplated herein.

[0095] For illustrative purposes, referring back to FIG. 2, the TIP set depicted is 9 peptides of 9 amino acids in length. As previously described, the TIP sets generally contemplated herein are from about 9 peptides of 9 amino acids in length to about 21 peptides of 21 amino acids in length. FIG. 3 is an illustrative example of a group of differing size TIP sets directed to the reference locus Leu at position 50 of the rFVIIIrp as depicted in FIG. 2. As illustrated in FIG. 3, using the reference locus, TIP sets of various peptide numbers and amino acid lengths are created through the frame-shifting process described previously. For example, FIG. 3 discloses a TIP set of 9 peptides of 9 amino acids in length. A TIP set are created comprising 10 peptides of 10 amino acids in length by using the frame-shifting process described above, resulting in an additional upstream and downstream amino acid residue from the rFVIIIrp being overlapped. The same process are used to create TIP sets of 11, 12, 13, 14, 15, 16, 17, 18, 19, 20, and 21 peptides of corresponding amino acid lengths.

[0096] The length of peptides between different TIP sets are the same length, or, in an alternative embodiment, different in length. For example, TIP sets for a subject with, for example, more than one amino acid differences between his FVIII protein and the FVIIIrp, are derived directed to each reference locus, wherein a first TIP set is directed to a first reference loci wherein the TIPs in the set are the same or a different amino acid length than the TIPs in a second TIP set directed to a second reference loci.

[0097] A TIP set can comprise one or more T cell epitopes. T cell epitopes are short antigenic peptides presented by major histocompatibility complex (MHC) receptors on the surfaces of antigen-presenting cells (APCs), such as dendritic cells, macrophages, and B cells. MHC surface receptors display both self-antigens and non-self (foreign) antigens, which are recognized by T cell receptors (TCRs) on the surfaces of T cells. Without being bound by a particular theory, it is believed that syngeneic apoptotic cells are phagocytosed by a population of tolerogenic DCs which present apoptotic cell-associated antigens in association with MHC II surface molecules under conditions that induce immunological tolerance to the antigen and suppress specific immunity. Methods of identifying T-cell epitopes for specific HLA phenotypes are generally known in the art: see, e.g., Nielsen et al. MHC class II epitope predictive algorithms. Immunology 2010; 130: 319-328; Wang et al. A systematic assessment of MHC class II peptide binding predictions and evaluation of a consensus approach. PLoS Comput Biol 2008; 4: e1000048; Mallios R R. Predicting class II MHC/peptide multi-level binding with an iterative stepwise discriminant analysis meta-algorithm. Bioinformatics 2001; 17: 942-948; Nielsen et al. Quantitative predictions of peptide binding to any HLA-DR molecule of known sequence: NetMHCIIpan. PLoS Comput Biol 2008; 4: e1000107.

[0098] In one aspect of the present invention, compositions comprising unique TIPs and TIP sets are provided for use in an immunogen tolerizing strategy. Compositions comprising a single TIP or set directed to a single reference locus, or multiple TIPs and TIP sets directed to one or more reference loci, are contemplated herein. In certain aspects, the TIPs and TIP sets described herein are associated with a carrier as described further below.

[0099] In one aspect of the present invention, compositions comprising one or more TIPs or TIP sets, wherein the reference loci of the TIP or TIP set is derived from a difference between a sFVIII and a rFVIIIrp as a result of missense mutations in the subject's F8 gene, nonsynonymous single-nucleotide polymorphisms (nsSNPs) or haplotypic variations between the sFVIII and rFVIIIrp, deletions, inversions, for example intron 1 or 22 inversions, administration of rFVIIIrp with synthetic linker sequences, for example BDD-rFVIIIrp, and the like, or combinations thereof, are contemplated herein. In one embodiment, the compositions comprise one or more TIPs or TIP sets, wherein the reference loci of the TIP or TIP set is derived from a difference between a sFVIII and a rFVIIIrp as a result of one or more missense mutations in the subject's F8 gene. In one embodiment, the compositions comprise one or more TIPs or TIP sets, wherein the reference loci of the TIP or TIP set is derived from a difference between a sFVIII and a rFVIIIrp as a result of one or more nonsynonymous single-nucleotide polymorphisms (nsSNPs) or haplotypic variations between the sFVIII and rFVIIIrp. In one embodiment, the compositions comprise one or more TIPs or TIP sets, wherein the reference loci of the TIP or TIP set is derived from a difference between a sFVIII and a rFVIIIrp as a result of one or more deletions within the subject's F8 gene. In one embodiment, the compositions comprise one or more TIPs or TIP sets, wherein the reference loci of the TIP or TIP set is derived from a difference between a sFVIII and a rFVIIIrp as a result of one or more inversions, for example intron 1 or 22 inversions. In one embodiment, the compositions comprise one or more TIPs or TIP sets, wherein the reference loci of the TIP or TIP set is derived from a difference between a sFVIII and a rFVIIIrp as a result of the use of rFVIIIrp with synthetic linker sequences, for example BDD-rFVIIIrp. In one embodiment, the compositions comprise one or more TIPs or TIP sets, wherein the reference loci of the TIP or TIP set is derived from a difference between a sFVIII and a rFVIIIrp as a result of a combination of any of the preceding.

[0100] In certain aspects of the present invention, compositions directed to specific TIPs and TIP sets described in Tables 2-87, and methods using the compositions thereof, are provided herein. In one embodiment, at least one or more TIPs comprising at least 9 amino acids, at least 10 amino acids, at least 11 amino acids, at least 12 amino acids, at least 13 amino acids, at least 14 amino acids, at least 15 amino acids, at least 16 amino acids, at least 17 amino acids, at least 18 amino acids, at least 19 amino acids, at least 20 amino acids, or at least 21 amino acids, including at least one reference locus based on a sFVIII missense mutation, identified in Tables 2-87 are provided. In one embodiment, a TIP set comprising at least 9 peptides, at least 10 peptides, at least 11 peptides, at least 12 peptides, at least 13 peptides, at 14 peptides, 15 peptides, at least 16 peptides, at least 17 peptides, at least 18 peptides, at least 19 peptides, at least 20 peptides or at least 21 peptides, wherein the first peptide of the set comprises a reference locus at its first amino acid position, the second peptide of the set comprises a reference locus at its second amino acid position, and each successive peptide in the set comprises a reference locus at an amino acid position frame-shifted one position downstream from the reference locus position of the preceding peptide, and wherein the last peptide of the set has a reference locus in its last amino acid position, wherein the TIP sets are generated from the TIPs identified in Tables 2-87 (reference locus bolded and underlined), are provided herein. Tables 2-87 are provided below.

[0101] In particular embodiments, TIPs and TIP sets comprising reference locus based on missense mutations selected from the group consisting of Arg593Cys (Table 31), Tyr2105Cys (Table 67), Arg2150His (Table 69), Pro2300Leu (Table 84), Trp2229Cys (Table 79), Arg1997Pro (Table 57), or Asn2286Lys (Table 83) are provided herein. In certain aspects of the present invention, compositions directed to specific TIPs and TIP sets described in Tables 31, 57, 67, 69, 79, 83, or 84, and methods using the compositions thereof, are provided herein. In one embodiment, at least one or more TIPs comprising at least 9 amino acids, at least 10 amino acids, at least 11 amino acids, at least 12 amino acids, at least 13 amino acids, at least 14 amino acids, at least 15 amino acids, at least 16 amino acids, at least 17 amino acids, at least 18 amino acids, at least 19 amino acids, at least 20 amino acids, or at least 21 amino acids, including at least one reference locus based on a sFVIII missense mutation, identified in Tables 31, 57, 67, 69, 79, 83, or 84 are provided. In one embodiment, a TIP set comprising at least 9 peptides, at least 10 peptides, at least 11 peptides, at least 12 peptides, at least 13 peptides, at 14 peptides, 15 peptides, at least 16 peptides, at least 17 peptides, at least 18 peptides, at least 19 peptides, at least 20 peptides or at least 21 peptides, wherein the first peptide of the set comprises a reference locus at its first amino acid position, the second peptide of the set comprises a reference locus at its second amino acid position, and each successive peptide in the set comprises a reference locus at an amino acid position frame-shifted one position downstream from the reference locus position of the preceding peptide, and wherein the last peptide of the set has a reference locus in its last amino acid position, wherein the TIP sets are generated from the TIPs identified in Tables 31, 57, 67, 69, 79, 83, or 84, are provided herein (reference locus bolded and underlined).

TABLE 2

| Reference | Missense | | | |
|---|---|---|---|---|
| locus position | nucleotide | FVIIIrp/sFVIII | | |
| within | change | amino acid | SEQ ID | |
| FVIIIrp | (wt/sFVIII) | difference | NO: | TIP Set |
| 50 | CTG/CCG | Leu/Pro | 14 | LFVEFTDHLFNIAKPRPPWMG |
| | | | 15 | TLFVEFTDHLFNIAKPRPPWM |
| | | | 16 | KTLFVEFTDHLFNIAKPRPPW |
| | | | 17 | KKTLFVEFTDHLFNIAKPRPP |
| | | | 18 | YKKTLFVEFTDHLFNIAKPRP |
| | | | 19 | VYKKTLFVEFTDHLFNIAKPR |
| | | | 20 | VVYKKTLFVEFTDHLFNIAKP |
| | | | 21 | SVVYKKTLFVEFTDHLFNIAK |
| | | | 22 | TSVVYKKTLFVEFTDHLFNIA |
| | | | 23 | NTSVVYKKTLFVEFTDHLFNI |
| | | | 24 | FNTSVVYKKTLFVEFTDHLFN |
| | | | 25 | PFNTSVVYKKTLFVEFTDHLF |
| | | | 26 | FPFNTSVVYKKTLFVEFTDHL |
| | | | 27 | SFPFNTSVVYKKTLFVEFTDH |
| | | | 28 | KSFPFNTSVVYKKTLFVEFTD |
| | | | 29 | PKSFPFNTSVVYKKTLFVEFT |
| | | | 30 | VPKSFPFNTSVVYKKTLFVEF |
| | | | 31 | RVPKSFPFNTSVVYKKTLFVE |
| | | | 32 | PRVPKSFPFNTSVVYKKTLFV |
| | | | 33 | PPRVPKSFPFNTSVVYKKTLF |
| | | | 34 | FPPRVPKSFPFNTSVVYKKTL |

TABLE 3

| Reference | Missense | | | |
|---|---|---|---|---|
| locus position | nucleotide | FVIIIrp/sFVIII | SEQ | |
| within | change | amino acid | ID | |
| FVIIIrp | (wt/sFVIII) | difference | NO: | TIP Set |
| 78 | GCT/CCT | Ala/Pro | 35 | AEVYDTVVITLKNMASHPVSL |
| | | | 36 | QAEVYDTVVITLKNMASHPVS |
| | | | 37 | IQAEVYDTVVITLKNMASHPV |
| | | | 38 | TIQAEVYDTVVITLKNMASHP |
| | | | 39 | PTIQAEVYDTVVITLKNMASH |
| | | | 40 | GPTIQAEVYDTVVITLKNMAS |
| | | | 41 | LGPTIQAEVYDTVVITLKNMA |
| | | | 42 | LLGPTIQAEVYDTVVITLKNM |
| | | | 43 | GLLGPTIQAEVYDTVVITLKN |
| | | | 44 | MGLLGPTIQAEVYDTVVITLK |
| | | | 45 | WMGLLGPTIQAEVYDTVVITL |
| | | | 46 | PWMGLLGPTIQAEVYDTVVIT |
| | | | 47 | PPWMGLLGPTIQAEVYDTVVI |
| | | | 48 | RPPWMGLLGPTIQAEVYDTVV |
| | | | 49 | PRPPWMGLLGPTIQAEVYDTV |
| | | | 50 | KPRPPWMGLLGPTIQAEVYDT |
| | | | 51 | AKPRPPWMGLLGPTIQAEVYD |
| | | | 52 | IAKPRPPWMGLLGPTIQAEVY |
| | | | 53 | NIAKPRPPWMGLLGPTIQAEV |
| | | | 54 | FNIAKPRPPWMGLLGPTIQAE |
| | | | 55 | LFNIAKPRPPWMGLLGPTIQA |

TABLE 4

| | Missense | | | |
|---|---|---|---|---|
| Reference Locus | Nucleotide | FVIIIrp/sFVIII | SEQ | |
| Position within | Change | amino acid | ID | |
| FVIIIrp | (wt/sFVIII) | difference | NO: | TIP Set |
| 102 | GGT/GCT | Gly/Ala | 56 | GVSYWKASEGAEYDDQTSQRE |
| | | | 57 | VGVSYWKASEGAEYDDQTSQR |
| | | | 58 | AVGVSYWKASEGAEYDDQTSQ |
| | | | 59 | HAVGVSYWKASEGAEYDDQTS |
| | | | 60 | LHAVGVSYWKASEGAEYDDQT |
| | | | 61 | SLHAVGVSYWKASEGAEYDDQ |
| | | | 62 | VSLHAVGVSYWKASEGAEYDD |
| | | | 63 | PVSLHAVGVSYWKASEGAEYD |
| | | | 64 | HPVSLHAVGVSYWKASEGAEY |
| | | | 65 | SHPVSLHAVGVSYWKASEGAE |
| | | | 66 | ASHPVSLHAVGVSYWKASEGA |
| | | | 67 | MASHPVSLHAVGVSYWKASEG |
| | | | 68 | NMASHPVSLHAVGVSYWKASE |
| | | | 69 | KNMASHPVSLHAVGVSYWKAS |
| | | | 70 | LKNMASHPVSLHAVGVSYWKA |
| | | | 71 | TLKNMASHPVSLHAVGVSYWK |
| | | | 72 | ITLKNMASHPVSLHAVGVSYW |
| | | | 73 | VITLKNMASHPVSLHAVGVSY |
| | | | 74 | VVITLKNMASHPVSLHAVGVS |
| | | | 75 | TVVITLKNMASHPVSLHAVGV |
| | | | 76 | DTVVITLKNMASHPVSLHAVG |

TABLE 5

| | Missense | | | |
|---|---|---|---|---|
| Reference Locus | Nucleotide | FVIIIrp/sFVIII | SEQ | |
| Position within | Change | amino acid | ID | |
| FVIIIrp | (wt/sFVIII) | difference | NO: | TIP Set |
| 113 | GAA/GAC | Glu/Asp | 77 | EYDDQTSQREKEDDKVFPGGS |
| | | | 78 | AEYDDQTSQREKEDDKVFPGG |
| | | | 79 | GAEYDDQTSQREKEDDKVFPG |
| | | | 80 | EGAEYDDQTSQREKEDDKVFP |
| | | | 81 | SEGAEYDDQTSQREKEDDKVF |
| | | | 82 | ASEGAEYDDQTSQREKEDDKV |
| | | | 83 | KASEGAEYDDQTSQREKEDDK |
| | | | 84 | WKASEGAEYDDQTSQREKEDD |
| | | | 85 | YWKASEGAEYDDQTSQREKED |
| | | | 86 | SYWKASEGAEYDDQTSQREKE |
| | | | 87 | VSYWKASEGAEYDDQTSQREK |
| | | | 88 | GVSYWKASEGAEYDDQTSQRE |
| | | | 89 | VGVSYWKASEGAEYDDQTSQR |
| | | | 90 | AVGVSYWKASEGAEYDDQTSQ |
| | | | 91 | HAVGVSYWKASEGAEYDDQTS |
| | | | 92 | LHAVGVSYWKASEGAEYDDQT |
| | | | 93 | SLHAVGVSYWKASEGAEYDDQ |
| | | | 94 | VSLHAVGVSYWKASEGAEYDD |
| | | | 95 | PVSLHAVGVSYWKASEGAEYD |
| | | | 96 | HPVSLHAVGVSYWKASEGAEY |
| | | | 97 | SHPVSLHAVGVSYWKASEGAE |

TABLE 6

| | Missense | | | |
|---|---|---|---|---|
| Reference Locus | Nucleotide | FVIIIrp/sFVIII | SEQ | |
| Position within | Change | amino acid | ID | |
| FVIIIrp | (wt/sFVIII) | difference | NO: | TIP Set |
| 154 | CTT/TTT | Leu/Phe | 98 | LTYSYLSHVDLVKDLNSGLIG |
| | | | 99 | CLTYSYLSHVDLVKDLNSGLI |
| | | | 100 | LCLTYSYLSHVDLVKDLNSGL |
| | | | 101 | PLCLTYSYLSHVDLVKDLNSG |
| | | | 102 | DPLCLTYSYLSHVDLVKDLNS |
| | | | 103 | SDPLCLTYSYLSHVDLVKDLN |
| | | | 104 | ASDPLCLTYSYLSHVDLVKDL |
| | | | 105 | MASDPLCLTYSYLSHVDLVKD |
| | | | 106 | PMASDPLCLTYSYLSHVDLVK |
| | | | 107 | GPMASDPLCLTYSYLSHVDLV |
| | | | 108 | NGPMASDPLCLTYSYLSHVDL |
| | | | 109 | ENGPMASDPLCLTYSYLSHVD |
| | | | 110 | KENGPMASDPLCLTYSYLSHV |
| | | | 111 | LKENGPMASDPLCLTYSYLSH |
| | | | 112 | VLKENGPMASDPLCLTYSYLS |
| | | | 113 | QVLKENGPMASDPLCLTYSYL |
| | | | 114 | WQVLKENGPMASDPLCLTYSY |
| | | | 115 | VWQVLKENGPMASDPLCLTYS |
| | | | 116 | YVWQVLKENGPMASDPLCLTY |
| | | | 117 | TYVWQVLKENGPMASDPLCLT |
| | | | 118 | HTYVWQVLKENGPMASDPLCL |

TABLE 7

| | Missense | | | |
|---|---|---|---|---|
| Reference Locus | Nucleotide | FVIIIrp/sFVIII | SEQ | |
| Position within | Change | amino acid | ID | |
| FVIIIrp | (wt/sFVIII) | difference | NO: | TIP Set |
| 163 | GAC/GTC | Asp/Val | 119 | DLVKDLNSGLIGALLVCREGS |
| | | | 120 | VDLVKDLNSGLIGALLVCREG |
| | | | 121 | HVDLVKDLNSGLIGALLVCRE |
| | | | 122 | SHVDLVKDLNSGLIGALLVCR |
| | | | 123 | LSHVDLVKDLNSGLIGALLVC |
| | | | 124 | YLSHVDLVKDLNSGLIGALLV |
| | | | 125 | SYLSHVDLVKDLNSGLIGALL |
| | | | 126 | YSYLSHVDLVKDLNSGLIGAL |
| | | | 127 | TYSYLSHVDLVKDLNSGLIGA |
| | | | 128 | LTYSYLSHVDLVKDLNSGLIG |
| | | | 129 | CLTYSYLSHVDLVKDLNSGLI |
| | | | 130 | LCLTYSYLSHVDLVKDLNSGL |
| | | | 131 | PLCLTYSYLSHVDLVKDLNSG |
| | | | 132 | DPLCLTYSYLSHVDLVKDLNS |
| | | | 133 | SDPLCLTYSYLSHVDLVKDLN |
| | | | 134 | ASDPLCLTYSYLSHVDLVKDL |
| | | | 135 | MASDPLCLTYSYLSHVDLVKD |
| | | | 136 | PMASDPLCLTYSYLSHVDLVK |
| | | | 137 | GPMASDPLCLTYSYLSHVDLV |
| | | | 138 | NGPMASDPLCLTYSYLSHVDL |
| | | | 139 | ENGPMASDPLCLTYSYLSHVD |

TABLE 8

| | Missense | | | |
|---|---|---|---|---|
| Reference Locus | Nucleotide | FVIIIrp/sFVIII | SEQ | |
| Position within | Change | amino acid | ID | |
| FVIIIrp | (wt/sFVIII) | difference | NO: | TIP Set |
| 198 | CTT/CAT | Leu/His | 140 | LFAVFDEGKSWHSETKNSLMQ |
| | | | 141 | LLFAVFDEGKSWHSETKNSLM |
| | | | 142 | ILLFAVFDEGKSWHSETKNSL |
| | | | 143 | FILLFAVFDEGKSWHSETKNS |
| | | | 144 | KFILLFAVFDEGKSWHSETKN |
| | | | 145 | HKFILLFAVFDEGKSWHSETK |
| | | | 146 | LHKFILLFAVFDEGKSWHSET |
| | | | 147 | TLHKFILLFAVFDEGKSWHSE |
| | | | 148 | QTLHKFILLFAVFDEGKSWHS |
| | | | 149 | TQTLHKFILLFAVFDEGKSWH |
| | | | 150 | KTQTLHKFILLFAVFDEGKSW |
| | | | 151 | EKTQTLHKFILLFAVFDEGKS |
| | | | 152 | KEKTQTLHKFILLFAVFDEGK |
| | | | 153 | AKEKTQTLHKFILLFAVFDEG |
| | | | 154 | LAKEKTQTLHKFILLFAVFDE |
| | | | 155 | SLAKEKTQTLHKFILLFAVFD |
| | | | 156 | GSLAKEKTQTLHKFILLFAVF |
| | | | 157 | EGSLAKEKTQTLHKFILLFAV |
| | | | 158 | REGSLAKEKTQTLHKFILLFA |
| | | | 159 | CREGSLAKEKTQTLHKFILLF |
| | | | 160 | VCREGSLAKEKTQTLHKFILL |

TABLE 9

| | Missense | | | |
|---|---|---|---|---|
| Reference Locus | Nucleotide | FVIIIrp/sFVIII | SEQ | |
| Position within | Change | amino acid | ID | |
| FVIIIrp | (wt/sFVIII) | difference | NO: | TIP Set |
| 204 | GAA/AAA | Glu/Lys | 161 | EGKSWHSETKNSLMQDRDAAS |
| | | | 162 | DEGKSWHSETKNSLMQDRDAA |
| | | | 163 | FDEGKSWHSETKNSLMQDRDA |
| | | | 164 | VFDEGKSWHSETKNSLMQDRD |
| | | | 165 | AVFDEGKSWHSETKNSLMQDR |
| | | | 166 | FAVFDEGKSWHSETKNSLMQD |
| | | | 167 | LFAVFDEGKSWHSETKNSLMQ |
| | | | 168 | LLFAVFDEGKSWHSETKNSLM |
| | | | 169 | ILLFAVFDEGKSWHSETKNSL |
| | | | 170 | FILLFAVFDEGKSWHSETKNS |
| | | | 171 | KFILLFAVFDEGKSWHSETKN |
| | | | 172 | HKFILLFAVFDEGKSWHSETK |
| | | | 173 | LHKFILLFAVFDEGKSWHSET |
| | | | 174 | TLHKFILLFAVFDEGKSWHSE |
| | | | 175 | QTLHKFILLFAVFDEGKSWHS |
| | | | 176 | TQTLHKFILLFAVFDEGKSWH |
| | | | 177 | KTQTLHKFILLFAVFDEGKSW |
| | | | 178 | EKTQTLHKFILLFAVFDEGKS |
| | | | 179 | KEKTQTLHKFILLFAVFDEGK |
| | | | 180 | AKEKTQTLHKFILLFAVFDEG |
| | | | 181 | LAKEKTQTLHKFILLFAVFDE |

TABLE 10

| | Missense | | | |
|---|---|---|---|---|
| Reference Locus | Nucleotide | FVIIIrp/sFVIII | SEQ | |
| Position within | Change | amino acid | ID | |
| FVIIIrp | (wt/sFVIII) | difference | NO: | TIP Set |
| 267 | CAC/CCC | His/Pro | 182 | HSIFLEGHTFLVRNHRQASLE |
| | | | 183 | VHSIFLEGHTFLVRNHRQASL |
| | | | 184 | EVHSIFLEGHTFLVRNHRQAS |
| | | | 185 | PEVHSIFLEGHTFLVRNHRQA |
| | | | 186 | TPEVHSIFLEGHTFLVRNHRQ |
| | | | 187 | TTPEVHSIFLEGHTFLVRNHR |
| | | | 188 | GTTPEVHSIFLEGHTFLVRNH |
| | | | 189 | MGTTPEVHSIFLEGHTFLVRN |
| | | | 190 | GMGTTPEVHSIFLEGHTFLVR |
| | | | 191 | IGMGTTPEVHSIFLEGHTFLV |
| | | | 192 | VIGMGTTPEVHSIFLEGHTFL |
| | | | 193 | HVIGMGTTPEVHSIFLEGHTF |
| | | | 194 | WHVIGMGTTPEVHSIFLEGHT |
| | | | 195 | YWHVIGMGTTPEVHSIFLEGH |
| | | | 196 | VYWHVIGMGTTPEVHSIFLEG |
| | | | 197 | SVYWHVIGMGTTPEVHSIFLE |
| | | | 198 | KSVYWHVIGMGTTPEVHSIFL |
| | | | 199 | RKSVYWHVIGMGTTPEVHSIF |
| | | | 200 | HRKSVYWHVIGMGTTPEVHSI |
| | | | 201 | CHRKSVYWHVIGMGTTPEVHS |
| | | | 202 | GCHRKSVYWHVIGMGTTPEVH |

TABLE 11

| | Missense | | | |
|---|---|---|---|---|
| Reference Locus | Nucleotide | FVIIIrp/sFVIII | SEQ | |
| Position within | Change | amino acid | ID | |
| FVIIIrp | (wt/sFVIII) | difference | NO: | TIP Set |
| 276 | TTT/CTT | Phe/Leu | 203 | FLVRNHRQASLEISPITFLTA |
| | | | 204 | TFLVRNHRQASLEISPITFLT |
| | | | 205 | HTFLVRNHRQASLEISPITFL |
| | | | 206 | GHTFLVRNHRQASLEISPITF |
| | | | 207 | EGHTFLVRNHRQASLEISPIT |
| | | | 208 | LEGHTFLVRNHRQASLEISPI |
| | | | 209 | FLEGHTFLVRNHRQASLEISP |
| | | | 210 | IFLEGHTFLVRNHRQASLEIS |
| | | | 211 | SIFLEGHTFLVRNHRQASLEI |
| | | | 212 | HSIFLEGHTFLVRNHRQASLE |
| | | | 213 | VHSIFLEGHTFLVRNHRQASL |
| | | | 214 | EVHSIFLEGHTFLVRNHRQAS |
| | | | 215 | PEVHSIFLEGHTFLVRNHRQA |
| | | | 216 | TPEVHSIFLEGHTFLVRNHRQ |
| | | | 217 | TTPEVHSIFLEGHTFLVRNHR |
| | | | 218 | GTTPEVHSIFLEGHTFLVRNH |
| | | | 219 | MGTTPEVHSIFLEGHTFLVRN |
| | | | 220 | GMGTTPEVHSIFLEGHTFLVR |
| | | | 221 | IGMGTTPEVHSIFLEGHTFLV |
| | | | 222 | VIGMGTTPEVHSIFLEGHTFL |
| | | | 223 | HVIGMGTTPEVHSIFLEGHTF |

TABLE 12

| | Missense | | | |
|---|---|---|---|---|
| Reference Locus | Nucleotide | FVIIIrp/sFVIII | SEQ | |
| Position within | Change | amino acid | ID | |
| FVIIIrp | (wt/sFVIII) | difference | NO: | TIP Set |
| 277 | CTT/TTT | Leu/Phe | 224 | LVRNHRQASLEISPITFLTAQ |
| | | | 225 | FLVRNHRQASLEISPITFLTA |
| | | | 226 | TFLVRNHRQASLEISPITFLT |
| | | | 227 | HTFLVRNHRQASLEISPITFL |
| | | | 228 | GHTFLVRNHRQASLEISPITF |
| | | | 229 | EGHTFLVRNHRQASLEISPIT |
| | | | 230 | LEGHTFLVRNHRQASLEISPI |
| | | | 231 | FLEGHTFLVRNHRQASLEISP |
| | | | 232 | IFLEGHTFLVRNHRQASLEIS |
| | | | 233 | SIFLEGHTFLVRNHRQASLEI |
| | | | 234 | HSIFLEGHTFLVRNHRQASLE |
| | | | 235 | VHSIFLEGHTFLVRNHRQASL |
| | | | 236 | EVHSIFLEGHTFLVRNHRQAS |
| | | | 237 | PEVHSIFLEGHTFLVRNHRQA |
| | | | 238 | TPEVHSIFLEGHTFLVRNHRQ |
| | | | 239 | TTPEVHSIFLEGHTFLVRNHR |
| | | | 240 | GTTPEVHSIFLEGHTFLVRNH |
| | | | 241 | MGTTPEVHSIFLEGHTFLVRN |
| | | | 242 | GMGTTPEVHSIFLEGHTFLVR |
| | | | 243 | IGMGTTPEVHSIFLEGHTFLV |
| | | | 244 | VIGMGTTPEVHSIFLEGHTFL |

TABLE 13

| | Missense | | | |
|---|---|---|---|---|
| Reference Locus | Nucleotide | FVIIIrp/sFVIII | SEQ | |
| Position within | Change | amino acid | ID | |
| FVIIIrp | (wt/sFVIII) | difference | NO: | TIP Set |
| 310 | TGT/TAT | Cys/Tyr | 245 | CHISSHQHDGMEAYVKVDSCP |
| | | | 246 | FCHISSHQHDGMEAYVKVDSC |
| | | | 247 | LFCHISSHQHDGMEAYVKVDS |
| | | | 248 | LLFCHISSHQHDGMEAYVKVD |
| | | | 249 | FLLFCHISSHQHDGMEAYVKV |
| | | | 250 | QFLLFCHISSHQHDGMEAYVK |
| | | | 251 | GQFLLFCHISSHQHDGMEAYV |
| | | | 252 | LGQFLLFCHISSHQHDGMEAY |
| | | | 253 | DLGQFLLFCHISSHQHDGMEA |
| | | | 254 | MDLGQFLLFCHISSHQHDGME |
| | | | 255 | LMDLGQFLLFCHISSHQHDGM |
| | | | 256 | LLMDLGQFLLFCHISSHQHDG |
| | | | 257 | TLLMDLGQFLLFCHISSHQHD |
| | | | 258 | QTLLMDLGQFLLFCHISSHQH |
| | | | 259 | AQTLLMDLGQFLLFCHISSHQ |
| | | | 260 | TAQTLLMDLGQFLLFCHISSH |
| | | | 261 | LTAQTLLMDLGQFLLFCHISS |
| | | | 262 | FLTAQTLLMDLGQFLLFCHIS |
| | | | 263 | TFLTAQTLLMDLGQFLLFCHI |
| | | | 264 | ITFLTAQTLLMDLGQFLLFCH |
| | | | 265 | PITFLTAQTLLMDLGQFLLFC |

TABLE 14

| | Missense | | | |
|---|---|---|---|---|
| Reference Locus | Nucleotide | FVIIIrp/sFVIII | SEQ | |
| Position within | Change | amino acid | ID | |
| FVIIIrp | (wt/sFVIII) | difference | NO: | TIP Set |
| 377 | AAG/ATG | Lys/Met | 266 | KHPKTWVHYIAAEEEDWDYAP |
| | | | 267 | KKHPKTWVHYIAAEEEDWDYA |
| | | | 268 | AKKHPKTWVHYIAAEEEDWDY |
| | | | 269 | VAKKHPKTWVHYIAAEEEDWD |
| | | | 270 | SVAKKHPKTWVHYIAAEEEDW |
| | | | 271 | RSVAKKHPKTWVHYIAAEEED |
| | | | 272 | IRSVAKKHPKTWVHYIAAEEE |
| | | | 273 | QIRSVAKKHPKTWVHYIAAEE |
| | | | 274 | IQIRSVAKKHPKTWVHYIAAE |
| | | | 275 | FIQIRSVAKKHPKTWVHYIAA |
| | | | 276 | SFIQIRSVAKKHPKTWVHYIA |
| | | | 277 | PSFIQIRSVAKKHPKTWVHYI |
| | | | 278 | SPSFIQIRSVAKKHPKTWVHY |
| | | | 279 | NSPSFIQIRSVAKKHPKTWVH |
| | | | 280 | DNSPSFIQIRSVAKKHPKTWV |
| | | | 281 | DDNSPSFIQIRSVAKKHPKTW |
| | | | 282 | DDDNSPSFIQIRSVAKKHPKT |
| | | | 283 | FDDDNSPSFIQIRSVAKKHPK |
| | | | 284 | RFDDDNSPSFIQIRSVAKKHP |
| | | | 285 | VRFDDDNSPSFIQIRSVAKKH |
| | | | 286 | VVRFDDDNSPSFIQIRSVAKK |

TABLE 15

| | Missense | | | |
|---|---|---|---|---|
| Reference Locus | Nucleotide | FVIIIrp/sFVIII | SEQ | |
| Position within | Change | amino acid | ID | |
| FVIIIrp | (wt/sFVIII) | difference | NO: | TIP Set |
| 384 | CAT/GAT | His/Asp | 287 | HYIAAEEEDWDYAPLVLAPDD |
| | | | 288 | VHYIAAEEEDWDYAPLVLAPD |
| | | | 289 | WVHYIAAEEEDWDYAPLVLAP |
| | | | 290 | TWVHYIAAEEEDWDYAPLVLA |
| | | | 291 | KTWVHYIAAEEEDWDYAPLVL |
| | | | 292 | PKTWVHYIAAEEEDWDYAPLV |
| | | | 293 | HPKTWVHYIAAEEEDWDYAPL |
| | | | 294 | KHPKTWVHYIAAEEEDWDYAP |
| | | | 295 | KKHPKTWVHYIAAEEEDWDYA |
| | | | 296 | AKKHPKTWVHYIAAEEEDWDY |
| | | | 297 | VAKKHPKTWVHYIAAEEEDWD |
| | | | 298 | SVAKKHPKTWVHYIAAEEEDW |
| | | | 299 | RSVAKKHPKTWVHYIAAEEED |
| | | | 300 | IRSVAKKHPKTWVHYIAAEEE |
| | | | 301 | QIRSVAKKHPKTWVHYIAAEE |
| | | | 302 | IQIRSVAKKHPKTWVHYIAAE |
| | | | 303 | FIQIRSVAKKHPKTWVHYIAA |
| | | | 304 | SFIQIRSVAKKHPKTWVHYIA |
| | | | 305 | PSFIQIRSVAKKHPKTWVHYI |
| | | | 306 | SPSFIQIRSVAKKHPKTWVHY |
| | | | 307 | NSPSFIQIRSVAKKHPKTWVH |

TABLE 16

| | Missense | | | |
|---|---|---|---|---|
| Reference Locus | Nucleotide | FVIIIrp/sFVIII | SEQ | |
| Position within | Change | amino acid | ID | |
| FVIIIrp | (wt/sFVIII) | difference | NO: | TIP Set |
| 393 | TGG/CGG | Trp/Arg | 308 | WDYAPLVLAPDDRSYKSQYLN |
| | | | 309 | DWDYAPLVLAPDDRSYKSQYL |
| | | | 310 | EDWDYAPLVLAPDDRSYKSQY |
| | | | 311 | EEDWDYAPLVLAPDDRSYKSQ |
| | | | 312 | EEEDWDYAPLVLAPDDRSYKS |
| | | | 313 | AEEEDWDYAPLVLAPDDRSYK |
| | | | 314 | AAEEEDWDYAPLVLAPDDRSY |
| | | | 315 | IAAEEEDWDYAPLVLAPDDRS |
| | | | 316 | YIAAEEEDWDYAPLVLAPDDR |
| | | | 317 | HYIAAEEEDWDYAPLVLAPDD |
| | | | 318 | VHYIAAEEEDWDYAPLVLAPD |
| | | | 319 | WVHYIAAEEEDWDYAPLVLAP |
| | | | 320 | TWVHYIAAEEEDWDYAPLVLA |
| | | | 321 | KTWVHYIAAEEEDWDYAPLVL |
| | | | 322 | PKTWVHYIAAEEEDWDYAPLV |
| | | | 323 | HPKTWVHYIAAEEEDWDYAPL |
| | | | 324 | KHPKTWVHYIAAEEEDWDYAP |
| | | | 325 | KKHPKTWVHYIAAEEEDWDYA |
| | | | 326 | AKKHPKTWVHYIAAEEEDWDY |
| | | | 327 | VAKKHPKTWVHYIAAEEEDWD |
| | | | 328 | SVAKKHPKTWVHYIAAEEEDW |

TABLE 17

| | Missense | | | |
|---|---|---|---|---|
| Reference Locus | Nucleotide | FVIIIrp/sFVIII | SEQ | |
| Position within | Change | amino acid | ID | |
| FVIIIrp | (wt/sFVIII) | difference | NO: | TIP Set |
| 396 | GCT/GTT | Ala/Val | 329 | APLVLAPDDRSYKSQYLNNGP |
| | | | 330 | YAPLVLAPDDRSYKSQYLNNG |
| | | | 331 | DYAPLVLAPDDRSYKSQYLNN |
| | | | 332 | WDYAPLVLAPDDRSYKSQYLN |
| | | | 333 | DWDYAPLVLAPDDRSYKSQYL |
| | | | 334 | EDWDYAPLVLAPDDRSYKSQY |
| | | | 335 | EEDWDYAPLVLAPDDRSYKSQ |
| | | | 336 | EEEDWDYAPLVLAPDDRSYKS |
| | | | 337 | AEEEDWDYAPLVLAPDDRSYK |
| | | | 338 | AAEEEDWDYAPLVLAPDDRSY |
| | | | 339 | IAAEEEDWDYAPLVLAPDDRS |
| | | | 340 | YIAAEEEDWDYAPLVLAPDDR |
| | | | 341 | HYIAAEEEDWDYAPLVLAPDD |
| | | | 342 | VHYIAAEEEDWDYAPLVLAPD |
| | | | 343 | WVHYIAAEEEDWDYAPLVLAP |
| | | | 344 | TWVHYIAAEEEDWDYAPLVLA |
| | | | 345 | KTWVHYIAAEEEDWDYAPLVL |
| | | | 346 | PKTWVHYIAAEEEDWDYAPLV |
| | | | 347 | HPKTWVHYIAAEEEDWDYAPL |
| | | | 348 | KHPKTWVHYIAAEEEDWDYAP |
| | | | 349 | KKHPKTWVHYIAAEEEDWDYA |

TABLE 18

| | Missense | | | |
|---|---|---|---|---|
| Reference Locus | Nucleotide | FVIIIrp/sFVIII | SEQ | |
| Position within | Change | amino acid | ID | |
| FVIIIrp | (wt/sFVIII) | difference | NO: | TIP Set |
| 405 | AGA/AGC | Arg/Ser | 350 | RSYKSQYLNNGPQRIGRKYKK |
| | | | 351 | DRSYKSQYLNNGPQRIGRKYK |
| | | | 352 | DDRSYKSQYLNNGPQRIGRKY |
| | | | 353 | PDDRSYKSQYLNNGPQRIGRK |
| | | | 354 | APDDRSYKSQYLNNGPQRIGR |
| | | | 355 | LAPDDRSYKSQYLNNGPQRIG |
| | | | 356 | VLAPDDRSYKSQYLNNGPQRI |
| | | | 357 | LVLAPDDRSYKSQYLNNGPQR |
| | | | 358 | PLVLAPDDRSYKSQYLNNGPQ |
| | | | 359 | APLVLAPDDRSYKSQYLNNGP |
| | | | 360 | YAPLVLAPDDRSYKSQYLNNG |
| | | | 361 | DYAPLVLAPDDRSYKSQYLNN |
| | | | 362 | WDYAPLVLAPDDRSYKSQYLN |
| | | | 363 | DWDYAPLVLAPDDRSYKSQYL |
| | | | 364 | EDWDYAPLVLAPDDRSYKSQY |
| | | | 365 | EEDWDYAPLVLAPDDRSYKSQ |
| | | | 366 | EEEDWDYAPLVLAPDDRSYKS |
| | | | 367 | AEEEDWDYAPLVLAPDDRSYK |
| | | | 368 | AAEEEDWDYAPLVLAPDDRSY |
| | | | 369 | IAAEEEDWDYAPLVLAPDDRS |
| | | | 370 | YIAAEEEDWDYAPLVLAPDDR |

TABLE 19

| | Missense | | | |
|---|---|---|---|---|
| Reference Locus | Nucleotide | FVIIIrp/sFVIII | SEQ | |
| Position within | Change | amino acid | ID | |
| FVIIIrp | (wt/sFVIII) | difference | NO: | TIP Set |
| 420 | GGT/GTT | Gly/Val | 371 | GRKYKKVRFMAYTDETFKTRE |
| | | | 372 | IGRKYKKVRFMAYTDETFKTR |
| | | | 373 | RIGRKYKKVRFMAYTDETFKT |
| | | | 374 | QRIGRKYKKVRFMAYTDETFK |
| | | | 375 | PQRIGRKYKKVRFMAYTDETF |
| | | | 376 | GPQRIGRKYKKVRFMAYTDET |
| | | | 377 | NGPQRIGRKYKKVRFMAYTDE |
| | | | 378 | NNGPQRIGRKYKKVRFMAYTD |
| | | | 379 | LNNGPQRIGRKYKKVRFMAYT |
| | | | 380 | YLNNGPQRIGRKYKKVRFMAY |
| | | | 381 | QYLNNGPQRIGRKYKKVRFMA |
| | | | 382 | SQYLNNGPQRIGRKYKKVRFM |
| | | | 383 | KSQYLNNGPQRIGRKYKKVRF |
| | | | 384 | YKSQYLNNGPQRIGRKYKKVR |
| | | | 385 | SYKSQYLNNGPQRIGRKYKKV |
| | | | 386 | RSYKSQYLNNGPQRIGRKYKK |
| | | | 387 | DRSYKSQYLNNGPQRIGRKYK |
| | | | 388 | DDRSYKSQYLNNGPQRIGRKY |
| | | | 389 | PDDRSYKSQYLNNGPQRIGRK |
| | | | 390 | APDDRSYKSQYLNNGPQRIGR |
| | | | 391 | LAPDDRSYKSQYLNNGPQRIG |

TABLE 20

| | Missense | | | |
|---|---|---|---|---|
| Reference Locus | Nucleotide | FVIIIrp/sFVIII | SEQ | |
| Position within | Change | amino acid | ID | |
| FVIIIrp | (wt/sFVIII) | difference | NO: | TIP Set |
| 439 | CGT/TGT | Arg/Cys | 392 | REAIQHESGILGPLLYGEVGD |
| | | | 393 | TREAIQHESGILGPLLYGEVG |
| | | | 394 | KTREAIQHESGILGPLLYGEV |
| | | | 395 | FKTREAIQHESGILGPLLYGE |
| | | | 396 | TFKTREAIQHESGILGPLLYG |
| | | | 397 | ETFKTREAIQHESGILGPLLY |
| | | | 398 | DETFKTREAIQHESGILGPLL |
| | | | 399 | TDETFKTREAIQHESGILGPL |
| | | | 400 | YTDETFKTREAIQHESGILGP |
| | | | 401 | AYTDETFKTREAIQHESGILG |
| | | | 402 | MAYTDETFKTREAIQHESGIL |
| | | | 403 | FMAYTDETFKTREAIQHESGI |
| | | | 404 | RFMAYTDETFKTREAIQHESG |
| | | | 405 | VRFMAYTDETFKTREAIQHES |
| | | | 406 | KVRFMAYTDETFKTREAIQHE |
| | | | 407 | KKVRFMAYTDETFKTREAIQH |
| | | | 408 | YKKVRFMAYTDETFKTREAIQ |
| | | | 409 | KYKKVRFMAYTDETFKTREAI |
| | | | 410 | RKYKKVRFMAYTDETFKTREA |
| | | | 411 | GRKYKKVRFMAYTDETFKTRE |
| | | | 412 | IGRKYKKVRFMAYTDETFKTR |

TABLE 21

| | Missense | | | |
|---|---|---|---|---|
| Reference Locus | Nucleotide | FVIIIrp/sFVIII | SEQ | |
| Position within | Change | amino acid | ID | |
| FVIIIrp | (wt/sFVIII) | difference | NO: | TIP Set |
| 451 | CCT/CGT | Pro/Arg | 413 | PLLYGEVGDTLLIIFKNQASR |
| | | | 414 | GPLLYGEVGDTLLIIFKNQAS |
| | | | 415 | LGPLLYGEVGDTLLIIFKNQA |
| | | | 416 | ILGPLLYGEVGDTLLIIFKNQ |
| | | | 417 | GILGPLLYGEVGDTLLIIFKN |
| | | | 418 | SGILGPLLYGEVGDTLLIIFK |
| | | | 419 | ESGILGPLLYGEVGDTLLIIF |
| | | | 420 | HESGILGPLLYGEVGDTLLII |
| | | | 421 | QHESGILGPLLYGEVGDTLLI |
| | | | 422 | IQHESGILGPLLYGEVGDTLL |
| | | | 423 | AIQHESGILGPLLYGEVGDTL |
| | | | 424 | EAIQHESGILGPLLYGEVGDT |
| | | | 425 | REAIQHESGILGPLLYGEVGD |
| | | | 426 | TREAIQHESGILGPLLYGEVG |
| | | | 427 | KTREAIQHESGILGPLLYGEV |
| | | | 428 | FKTREAIQHESGILGPLLYGE |
| | | | 429 | TFKTREAIQHESGILGPLLYG |
| | | | 430 | ETFKTREAIQHESGILGPLLY |
| | | | 431 | DETFKTREAIQHESGILGPLL |
| | | | 432 | TDETFKTREAIQHESGILGPL |
| | | | 433 | YTDETFKTREAIQHESGILGP |

TABLE 22

| | Missense | | | |
|---|---|---|---|---|
| Reference Locus | Nucleotide | FVIIIrp/sFVIII | SEQ | |
| Position within | Change | amino acid | ID | |
| FVIIIrp | (wt/sFVIII) | difference | NO: | TIP Set |
| 455 | GGG/GAG | Gly/Glu | 434 | GEVGDTLLIIFKNQASRPYNI |
| | | | 435 | YGEVGDTLLIIFKNQASRPYN |
| | | | 436 | LYGEVGDTLLIIFKNQASRPY |
| | | | 437 | LLYGEVGDTLLIIFKNQASRP |
| | | | 438 | PLLYGEVGDTLLIIFKNQASR |
| | | | 439 | GPLLYGEVGDTLLIIFKNQAS |
| | | | 440 | LGPLLYGEVGDTLLIIFKNQA |
| | | | 441 | ILGPLLYGEVGDTLLIIFKNQ |
| | | | 442 | GILGPLLYGEVGDTLLIIFKN |
| | | | 443 | SGILGPLLYGEVGDTLLIIFK |
| | | | 444 | ESGILGPLLYGEVGDTLLIIF |
| | | | 445 | HESGILGPLLYGEVGDTLLII |
| | | | 446 | QHESGILGPLLYGEVGDTLLI |
| | | | 447 | IQHESGILGPLLYGEVGDTLL |
| | | | 448 | AIQHESGILGPLLYGEVGDTL |
| | | | 449 | EAIQHESGILGPLLYGEVGDT |
| | | | 450 | REAIQHESGILGPLLYGEVGD |
| | | | 451 | TREAIQHESGILGPLLYGEVG |
| | | | 452 | KTREAIQHESGILGPLLYGEV |
| | | | 453 | FKTREAIQHESGILGPLLYGE |
| | | | 454 | TFKTREAIQHESGILGPLLYG |

TABLE 23

| | Missense | | | |
|---|---|---|---|---|
| Reference Locus | Nucleotide | FVIIIrp/sFVIII | SEQ | |
| Position within | Change | amino acid | ID | |
| FVIIIrp | (wt/sFVIII) | difference | NO: | TIP Set |
| 479 | GGA/AGA | Gly/Arg | 455 | GITDVRPLYSRRLPKGVKHLK |
| | | | 456 | HGITDVRPLYSRRLPKGVKHL |
| | | | 457 | PHGITDVRPLYSRRLPKGVKH |
| | | | 458 | YPHGITDVRPLYSRRLPKGVK |
| | | | 459 | IYPHGITDVRPLYSRRLPKGV |
| | | | 460 | NIYPHGITDVRPLYSRRLPKG |
| | | | 461 | YNIYPHGITDVRPLYSRRLPK |
| | | | 462 | PYNIYPHGITDVRPLYSRRLP |
| | | | 463 | RPYNIYPHGITDVRPLYSRRL |
| | | | 464 | SRPYNIYPHGITDVRPLYSRR |
| | | | 465 | ASRPYNIYPHGITDVRPLYSR |
| | | | 466 | QASRPYNIYPHGITDVRPLYS |
| | | | 467 | NQASRPYNIYPHGITDVRPLY |
| | | | 468 | KNQASRPYNIYPHGITDVRPL |
| | | | 469 | FKNQASRPYNIYPHGITDVRP |
| | | | 470 | IFKNQASRPYNIYPHGITDVR |
| | | | 471 | IIFKNQASRPYNIYPHGITDV |
| | | | 472 | LIIFKNQASRPYNIYPHGITD |
| | | | 473 | LLIIFKNQASRPYNIYPHGIT |
| | | | 474 | TLLIIFKNQASRPYNIYPHGI |
| | | | 475 | DTLLIIFKNQASRPYNIYPHG |

TABLE 24

| | Missense | | | |
|---|---|---|---|---|
| Reference Locus | Nucleotide | FVIIIrp/sFVIII | SEQ | |
| Position within | Change | amino acid | ID | |
| FVIIIrp | (wt/sFVIII) | difference | NO: | TIP Set |
| 494 | GGT/AGT | Gly/Ser | 476 | GVKHLKDFPILPGEIFKYKWT |
| | | | 477 | KGVKHLKDFPILPGEIFKYKW |
| | | | 478 | PKGVKHLKDFPILPGEIFKYK |
| | | | 479 | LPKGVKHLKDFPILPGEIFKY |
| | | | 480 | RLPKGVKHLKDFPILPGEIFK |
| | | | 481 | RRLPKGVKHLKDFPILPGEIF |
| | | | 482 | SRRLPKGVKHLKDFPILPGEI |
| | | | 483 | YSRRLPKGVKHLKDFPILPGE |
| | | | 484 | LYSRRLPKGVKHLKDFPILPG |
| | | | 485 | PLYSRRLPKGVKHLKDFPILP |
| | | | 486 | RPLYSRRLPKGVKHLKDFPIL |
| | | | 487 | VRPLYSRRLPKGVKHLKDFPI |
| | | | 488 | DVRPLYSRRLPKGVKHLKDFP |
| | | | 489 | TDVRPLYSRRLPKGVKHLKDF |
| | | | 490 | ITDVRPLYSRRLPKGVKHLKD |
| | | | 491 | GITDVRPLYSRRLPKGVKHLK |
| | | | 492 | HGITDVRPLYSRRLPKGVKHL |
| | | | 493 | PHGITDVRPLYSRRLPKGVKH |
| | | | 494 | YPHGITDVRPLYSRRLPKGVK |
| | | | 495 | IYPHGITDVRPLYSRRLPKGV |
| | | | 496 | NIYPHGITDVRPLYSRRLPKG |

TABLE 25

| | Missense | | | |
|---|---|---|---|---|
| Reference Locus | Nucleotide | FVIIIrp/sFVIII | SEQ | |
| Position within | Change | amino acid | ID | |
| FVIIIrp | (wt/sFVIII) | difference | NO: | TIP Set |
| 531 | CGC/TGC | Arg/Cys | 497 | RYYSSFVNMERDLASGLIGPL |
| | | | 498 | TRYYSSFVNMERDLASGLIGP |
| | | | 499 | LTRYYSSFVNMERDLASGLIG |
| | | | 500 | CLTRYYSSFVNMERDLASGLI |
| | | | 501 | RCLTRYYSSFVNMERDLASGL |
| | | | 502 | PRCLTRYYSSFVNMERDLASG |
| | | | 503 | DPRCLTRYYSSFVNMERDLAS |
| | | | 504 | SDPRCLTRYYSSFVNMERDLA |
| | | | 505 | KSDPRCLTRYYSSFVNMERDL |
| | | | 506 | TKSDPRCLTRYYSSFVNMERD |
| | | | 507 | PTKSDPRCLTRYYSSFVNMER |
| | | | 508 | GPTKSDPRCLTRYYSSFVNME |
| | | | 509 | DGPTKSDPRCLTRYYSSFVNM |
| | | | 510 | EDGPTKSDPRCLTRYYSSFVN |
| | | | 511 | VEDGPTKSDPRCLTRYYSSFV |
| | | | 512 | TVEDGPTKSDPRCLTRYYSSF |
| | | | 513 | VTVEDGPTKSDPRCLTRYYSS |
| | | | 514 | TVTVEDGPTKSDPRCLTRYYS |
| | | | 515 | WTVTVEDGPTKSDPRCLTRYY |
| | | | 516 | KWTVTVEDGPTKSDPRCLTRY |
| | | | 517 | YKWTVTVEDGPTKSDPRCLTR |

TABLE 26

| | Missense | | | |
|---|---|---|---|---|
| Reference Locus | Nucleotide | FVIIIrp/sFVIII | SEQ | |
| Position within | Change | amino acid | ID | |
| FVIIIrp | (wt/sFVIII) | difference | NO: | TIP Set |
| 531 | CGC/CAC | Arg/His | 518 | RYYSSFVNMERDLASGLIGPL |
| | | | 519 | TRYYSSFVNMERDLASGLIGP |
| | | | 520 | LTRYYSSFVNMERDLASGLIG |
| | | | 521 | CLTRYYSSFVNMERDLASGLI |
| | | | 522 | RCLTRYYSSFVNMERDLASGL |
| | | | 523 | PRCLTRYYSSFVNMERDLASG |
| | | | 524 | DPRCLTRYYSSFVNMERDLAS |
| | | | 525 | SDPRCLTRYYSSFVNMERDLA |
| | | | 526 | KSDPRCLTRYYSSFVNMERDL |
| | | | 527 | TKSDPRCLTRYYSSFVNMERD |
| | | | 528 | PTKSDPRCLTRYYSSFVNMER |
| | | | 529 | GPTKSDPRCLTRYYSSFVNME |
| | | | 530 | DGPTKSDPRCLTRYYSSFVNM |
| | | | 531 | EDGPTKSDPRCLTRYYSSFVN |
| | | | 532 | VEDGPTKSDPRCLTRYYSSFV |
| | | | 533 | TVEDGPTKSDPRCLTRYYSSF |
| | | | 534 | VTVEDGPTKSDPRCLTRYYSS |
| | | | 535 | TVTVEDGPTKSDPRCLTRYYS |
| | | | 536 | WTVTVEDGPTKSDPRCLTRYY |
| | | | 537 | KWTVTVEDGPTKSDPRCLTRY |
| | | | 538 | YKWTVTVEDGPTKSDPRCLTR |

TABLE 27

| | Missense | | | |
|---|---|---|---|---|
| Reference Locus | Nucleotide | FVIIIrp/sFVIII | SEQ | |
| Position within | Change | amino acid | ID | |
| FVIIIrp | (wt/sFVIII) | difference | NO: | TIP Set |
| 534 | TCT/CCT | Ser/Pro | 539 | SSFVNMERDLASGLIGPLLIC |
| | | | 540 | YSSFVNMERDLASGLIGPLLI |
| | | | 541 | YYSSFVNMERDLASGLIGPLL |
| | | | 542 | RYYSSFVNMERDLASGLIGPL |
| | | | 543 | TRYYSSFVNMERDLASGLIGP |
| | | | 544 | LTRYYSSFVNMERDLASGLIG |
| | | | 545 | CLTRYYSSFVNMERDLASGLI |
| | | | 546 | RCLTRYYSSFVNMERDLASGL |
| | | | 547 | PRCLTRYYSSFVNMERDLASG |
| | | | 548 | DPRCLTRYYSSFVNMERDLAS |
| | | | 549 | SDPRCLTRYYSSFVNMERDLA |
| | | | 550 | KSDPRCLTRYYSSFVNMERDL |
| | | | 551 | TKSDPRCLTRYYSSFVNMERD |
| | | | 552 | PTKSDPRCLTRYYSSFVNMER |
| | | | 553 | GPTKSDPRCLTRYYSSFVNME |
| | | | 554 | DGPTKSDPRCLTRYYSSFVNM |
| | | | 555 | EDGPTKSDPRCLTRYYSSFVN |
| | | | 556 | VEDGPTKSDPRCLTRYYSSFV |
| | | | 557 | TVEDGPTKSDPRCLTRYYSSF |
| | | | 558 | VTVEDGPTKSDPRCLTRYYSS |
| | | | 559 | TVTVEDGPTKSDPRCLTRYYS |

TABLE 28

| | Missense | | | |
|---|---|---|---|---|
| Reference Locus | Nucleotide | FVIIIrp/sFVIII | SEQ | |
| Position within | Change | amino acid | ID | |
| FVIIIrp | (wt/sFVIII) | difference | NO: | TIP Set |
| 534 | TCT/CCT | Ser/Pro | 560 | SSFVNMERDLASGLIGPLLIC |
| | | | 561 | YSSFVNMERDLASGLIGPLLI |
| | | | 562 | YYSSFVNMERDLASGLIGPLL |
| | | | 563 | RYYSSFVNMERDLASGLIGPL |
| | | | 564 | TRYYSSFVNMERDLASGLIGP |
| | | | 565 | LTRYYSSFVNMERDLASGLIG |
| | | | 566 | CLTRYYSSFVNMERDLASGLI |
| | | | 567 | RCLTRYYSSFVNMERDLASGL |
| | | | 568 | PRCLTRYYSSFVNMERDLASG |
| | | | 569 | DPRCLTRYYSSFVNMERDLAS |
| | | | 570 | SDPRCLTRYYSSFVNMERDLA |
| | | | 571 | KSDPRCLTRYYSSFVNMERDL |
| | | | 572 | TKSDPRCLTRYYSSFVNMERD |
| | | | 573 | PTKSDPRCLTRYYSSFVNMER |
| | | | 574 | GPTKSDPRCLTRYYSSFVNME |
| | | | 575 | DGPTKSDPRCLTRYYSSFVNM |
| | | | 576 | EDGPTKSDPRCLTRYYSSFVN |
| | | | 577 | VEDGPTKSDPRCLTRYYSSFV |
| | | | 578 | TVEDGPTKSDPRCLTRYYSSF |
| | | | 579 | VTVEDGPTKSDPRCLTRYYSS |
| | | | 580 | TVTVEDGPTKSDPRCLTRYYS |

TABLE 29

| | Missense | | | |
|---|---|---|---|---|
| Reference Locus | Nucleotide | FVIIIrp/sFVIII | SEQ | |
| Position within | Change | amino acid | ID | |
| FVIIIrp | (wt/sFVIII) | difference | NO: | TIP Set |
| 535 | AGT/GGT | Ser/Gly | 581 | SFVNMERDLASGLIGPLLICY |
| | | | 582 | SSFVNMERDLASGLIGPLLIC |
| | | | 583 | YSSFVNMERDLASGLIGPLLI |
| | | | 584 | YYSSFVNMERDLASGLIGPLL |
| | | | 585 | RYYSSFVNMERDLASGLIGPL |
| | | | 586 | TRYYSSFVNMERDLASGLIGP |
| | | | 587 | LTRYYSSFVNMERDLASGLIG |
| | | | 588 | CLTRYYSSFVNMERDLASGLI |
| | | | 589 | RCLTRYYSSFVNMERDLASGL |
| | | | 590 | PRCLTRYYSSFVNMERDLASG |
| | | | 591 | DPRCLTRYYSSFVNMERDLAS |
| | | | 592 | SDPRCLTRYYSSFVNMERDLA |
| | | | 593 | KSDPRCLTRYYSSFVNMERDL |
| | | | 594 | TKSDPRCLTRYYSSFVNMERD |
| | | | 595 | PTKSDPRCLTRYYSSFVNMER |
| | | | 596 | GPTKSDPRCLTRYYSSFVNME |
| | | | 597 | DGPTKSDPRCLTRYYSSFVNM |
| | | | 598 | EDGPTKSDPRCLTRYYSSFVN |
| | | | 599 | VEDGPTKSDPRCLTRYYSSFV |
| | | | 600 | TVEDGPTKSDPRCLTRYYSSF |
| | | | 601 | VTVEDGPTKSDPRCLTRYYSS |

TABLE 30

| | Missense | | | |
|---|---|---|---|---|
| Reference Locus | Nucleotide | FVIIIrp/sFVIII | SEQ | |
| Position within | Change | amino acid | ID | |
| FVIIIrp | (wt/sFVIII) | difference | NO: | TIP Set |
| 566 | ATA/ACA | Ile/Thr | 602 | IMSDKRNVILFSVFDENRSWY |
| | | | 603 | QIMSDKRNVILFSVFDENRSW |
| | | | 604 | NQIMSDKRNVILFSVFDENRS |
| | | | 605 | GNQIMSDKRNVILFSVFDENR |
| | | | 606 | RGNQIMSDKRNVILFSVFDEN |
| | | | 607 | QRGNQIMSDKRNVILFSVFDE |
| | | | 608 | DQRGNQIMSDKRNVILFSVFD |
| | | | 609 | VDQRGNQIMSDKRNVILFSVF |
| | | | 610 | SVDQRGNQIMSDKRNVILFSV |
| | | | 611 | ESVDQRGNQIMSDKRNVILFS |
| | | | 612 | KESVDQRGNQIMSDKRNVILF |
| | | | 613 | YKESVDQRGNQIMSDKRNVIL |
| | | | 614 | CYKESVDQRGNQIMSDKRNVI |
| | | | 615 | ICYKESVDQRGNQIMSDKRNV |
| | | | 616 | LICYKESVDQRGNQIMSDKRN |
| | | | 617 | LLICYKESVDQRGNQIMSDKR |
| | | | 618 | PLLICYKESVDQRGNQIMSDK |
| | | | 619 | GPLLICYKESVDQRGNQIMSD |
| | | | 620 | IGPLLICYKESVDQRGNQIMS |
| | | | 621 | LIGPLLICYKESVDQRGNQIM |
| | | | 622 | GLIGPLLICYKESVDQRGNQI |

TABLE 31

| | Missense | | | |
|---|---|---|---|---|
| Reference Locus | Nucleotide | FVIIIrp/sFVIII | SEQ | |
| Position within | Change | amino acid | ID | |
| FVIIIrp | (wt/sFVIII) | difference | NO: | TIP Set |
| 593 | CGC/TGC | Arg/Cys | 623 | RFLPNPAGVQLEDPEFQASNI |
| | | | 624 | QRFLPNPAGVQLEDPEFQASN |
| | | | 625 | IQRFLPNPAGVQLEDPEFQAS |
| | | | 626 | NIQRFLPNPAGVQLEDPEFQA |
| | | | 627 | ENIQRFLPNPAGVQLEDPEFQ |
| | | | 628 | TENIQRFLPNPAGVQLEDPEF |
| | | | 629 | LTENIQRFLPNPAGVQLEDPE |
| | | | 630 | YLTENIQRFLPNPAGVQLEDP |
| | | | 631 | WYLTENIQRFLPNPAGVQLED |
| | | | 632 | SWYLTENIQRFLPNPAGVQLE |
| | | | 633 | RSWYLTENIQRFLPNPAGVQL |
| | | | 634 | NRSWYLTENIQRFLPNPAGVQ |
| | | | 635 | ENRSWYLTENIQRFLPNPAGV |
| | | | 636 | DENRSWYLTENIQRFLPNPAG |
| | | | 637 | FDENRSWYLTENIQRFLPNPA |
| | | | 638 | VFDENRSWYLTENIQRFLPNP |
| | | | 639 | SVFDENRSWYLTENIQRFLPN |
| | | | 640 | FSVFDENRSWYLTENIQRFLP |
| | | | 641 | LFSVFDENRSWYLTENIQRFL |
| | | | 642 | ILFSVFDENRSWYLTENIQRF |
| | | | 643 | VILFSVFDENRSWYLTENIQR |

TABLE 32

| | Missense | | | |
|---|---|---|---|---|
| Reference Locus | Nucleotide | FVIIIrp/sFVIII | SEQ | |
| Position within | Change | amino acid | ID | |
| FVIIIrp | (wt/sFVIII) | difference | NO: | TIP Set |
| 612 | AAC/AGC | Asn/Ser | 644 | NIMHSINGYVFDSLQLSVCLH |
| | | | 645 | SNIMHSINGYVFDSLQLSVCL |
| | | | 646 | ASNIMHSINGYVFDSLQLSVC |
| | | | 647 | QASNIMHSINGYVFDSLQLSV |
| | | | 648 | FQASNIMHSINGYVFDSLQLS |
| | | | 649 | EFQASNIMHSINGYVFDSLQL |
| | | | 650 | PEFQASNIMHSINGYVFDSLQ |
| | | | 651 | DPEFQASNIMHSINGYVFDSL |
| | | | 652 | EDPEFQASNIMHSINGYVFDS |
| | | | 653 | LEDPEFQASNIMHSINGYVFD |
| | | | 654 | QLEDPEFQASNIMHSINGYVF |
| | | | 655 | VQLEDPEFQASNIMHSINGYV |
| | | | 656 | GVQLEDPEFQASNIMHSINGY |
| | | | 657 | AGVQLEDPEFQASNIMHSING |
| | | | 658 | PAGVQLEDPEFQASNIMHSIN |
| | | | 659 | NPAGVQLEDPEFQASNIMHSI |
| | | | 660 | PNPAGVQLEDPEFQASNIMHS |
| | | | 661 | LPNPAGVQLEDPEFQASNIMH |
| | | | 662 | FLPNPAGVQLEDPEFQASNIM |
| | | | 663 | RFLPNPAGVQLEDPEFQASNI |
| | | | 664 | QRFLPNPAGVQLEDPEFQASN |

TABLE 33

| | Missense | | | |
|---|---|---|---|---|
| Reference Locus | Nucleotide | FVIIIrp/sFVIII | SEQ | |
| Position within | Change | amino acid | ID | |
| FVIIIrp | (wt/sFVIII) | difference | NO: | TIP Set |
| 614 | ATG/ATT | Met/Ile | 665 | MHSINGYVFDSLQLSVCLHEV |
| | | | 666 | IMHSINGYVFDSLQLSVCLHE |
| | | | 667 | NIMHSINGYVFDSLQLSVCLH |
| | | | 668 | SNIMHSINGYVFDSLQLSVCL |
| | | | 669 | ASNIMHSINGYVFDSLQLSVC |
| | | | 670 | QASNIMHSINGYVFDSLQLSV |
| | | | 671 | FQASNIMHSINGYVFDSLQLS |
| | | | 672 | EFQASNIMHSINGYVFDSLQL |
| | | | 673 | PEFQASNIMHSINGYVFDSLQ |
| | | | 674 | DPEFQASNIMHSINGYVFDSL |
| | | | 675 | EDPEFQASNIMHSINGYVFDS |
| | | | 676 | LEDPEFQASNIMHSINGYVFD |
| | | | 677 | QLEDPEFQASNIMHSINGYVF |
| | | | 678 | VQLEDPEFQASNIMHSINGYV |
| | | | 679 | GVQLEDPEFQASNIMHSINGY |
| | | | 680 | AGVQLEDPEFQASNIMHSING |
| | | | 681 | PAGVQLEDPEFQASNIMHSIN |
| | | | 682 | NPAGVQLEDPEFQASNIMHSI |
| | | | 683 | PNPAGVQLEDPEFQASNIMHS |
| | | | 684 | LPNPAGVQLEDPEFQASNIMH |
| | | | 685 | FLPNPAGVQLEDPEFQASNIM |

TABLE 34

| | Missense | | | |
|---|---|---|---|---|
| Reference Locus | Nucleotide | FVIIIrp/sFVIII | SEQ | |
| Position within | Change | amino acid | ID | |
| FVIIIrp | (wt/sFVIII) | difference | NO: | TIP Set |
| 618 | AAT/AGT | Asn/Ser | 686 | NGYVFDSLQLSVCLHEVAYWY |
| | | | 687 | INGYVFDSLQLSVCLHEVAYW |
| | | | 688 | SINGYVFDSLQLSVCLHEVAY |
| | | | 689 | HSINGYVFDSLQLSVCLHEVA |
| | | | 690 | MHSINGYVFDSLQLSVCLHEV |
| | | | 691 | IMHSINGYVFDSLQLSVCLHE |
| | | | 692 | NIMHSINGYVFDSLQLSVCLH |
| | | | 693 | SNIMHSINGYVFDSLQLSVCL |
| | | | 694 | ASNIMHSINGYVFDSLQLSVC |
| | | | 695 | QASNIMHSINGYVFDSLQLSV |
| | | | 696 | FQASNIMHSINGYVFDSLQLS |
| | | | 697 | EFQASNIMHSINGYVFDSLQL |
| | | | 698 | PEFQASNIMHSINGYVFDSLQ |
| | | | 699 | DPEFQASNIMHSINGYVFDSL |
| | | | 700 | EDPEFQASNIMHSINGYVFDS |
| | | | 701 | LEDPEFQASNIMHSINGYVFD |
| | | | 702 | QLEDPEFQASNIMHSINGYVF |
| | | | 703 | VQLEDPEFQASNIMHSINGYV |
| | | | 704 | GVQLEDPEFQASNIMHSINGY |
| | | | 705 | AGVQLEDPEFQASNIMHSING |
| | | | 706 | PAGVQLEDPEFQASNIMHSIN |

TABLE 35

| | Missense | | | |
|---|---|---|---|---|
| Reference Locus | Nucleotide | FVIIIrp/sFVIII | SEQ | |
| Position within | Change | amino acid | ID | |
| FVIIIrp | (wt/sFVIII) | difference | NO: | TIP Set |
| 663 | GTC/TTC | Val/Phe | 707 | VYEDTLTLFPFSGETVFMSME |
| | | | 708 | MVYEDTLTLFPFSGETVFMSM |
| | | | 709 | KMVYEDTLTLFPFSGETVFMS |
| | | | 710 | HKMVYEDTLTLFPFSGETVFM |
| | | | 711 | KHKMVYEDTLTLFPFSGETVF |
| | | | 712 | FKHKMVYEDTLTLFPFSGETV |
| | | | 713 | TFKHKMVYEDTLTLFPFSGET |
| | | | 714 | YTFKHKMVYEDTLTLFPFSGE |
| | | | 715 | GYTFKHKMVYEDTLTLFPFSG |
| | | | 716 | SGYTFKHKMVYEDTLTLFPFS |
| | | | 717 | FSGYTFKHKMVYEDTLTLFPF |
| | | | 718 | FFSGYTFKHKMVYEDTLTLFP |
| | | | 719 | VFFSGYTFKHKMVYEDTLTLF |
| | | | 720 | SVFFSGYTFKHKMVYEDTLTL |
| | | | 721 | LSVFFSGYTFKHKMVYEDTLT |
| | | | 722 | FLSVFFSGYTFKHKMVYEDTL |
| | | | 723 | DFLSVFFSGYTFKHKMVYEDT |
| | | | 724 | TDFLSVFFSGYTFKHKMVYED |
| | | | 725 | QTDFLSVFFSGYTFKHKMVYE |
| | | | 726 | AQTDFLSVFFSGYTFKHKMVY |
| | | | 727 | GAQTDFLSVFFSGYTFKHKMV |

TABLE 36

| | Missense | | | |
|---|---|---|---|---|
| Reference Locus | Nucleotide | FVIIIrp/sFVIII | SEQ | |
| Position within | Change | amino acid | ID | |
| FVIIIrp | (wt/sFVIII) | difference | NO: | TIP Set |
| 684 | AAC/GAC | Asn/Asp | 728 | NPGLWILGCHNSDFRNRGMTA |
| | | | 729 | ENPGLWILGCHNSDFRNRGMT |
| | | | 730 | MENPGLWILGCHNSDFRNRGM |
| | | | 731 | SMENPGLWILGCHNSDFRNRG |
| | | | 732 | MSMENPGLWILGCHNSDFRNR |
| | | | 733 | FMSMENPGLWILGCHNSDFRN |
| | | | 734 | VFMSMENPGLWILGCHNSDFR |
| | | | 735 | TVFMSMENPGLWILGCHNSDF |
| | | | 736 | ETVFMSMENPGLWILGCHNSD |
| | | | 737 | GETVFMSMENPGLWILGCHNS |
| | | | 738 | SGETVFMSMENPGLWILGCHN |
| | | | 739 | FSGETVFMSMENPGLWILGCH |
| | | | 740 | PFSGETVFMSMENPGLWILGC |
| | | | 741 | FPFSGETVFMSMENPGLWILG |
| | | | 742 | LFPFSGETVFMSMENPGLWIL |
| | | | 743 | TLFPFSGETVFMSMENPGLWI |
| | | | 744 | LTLFPFSGETVFMSMENPGLW |
| | | | 745 | TLTLFPFSGETVFMSMENPGL |
| | | | 746 | DTLTLFPFSGETVFMSMENPG |
| | | | 747 | EDTLTLFPFSGETVFMSMENP |
| | | | 748 | YEDTLTLFPFSGETVFMSMEN |

TABLE 37

| | Missense | | | |
|---|---|---|---|---|
| Reference Locus | Nucleotide | FVIIIrp/sFVIII | SEQ | |
| Position within | Change | amino acid | ID | |
| FVIIIrp | (wt/sFVIII) | difference | NO: | TIP Set |
| 686 | GGT/CGT | Gly/Arg | 749 | GLWILGCHNSDFRNRGMTALL |
| | | | 750 | PGLWILGCHNSDFRNRGMTAL |
| | | | 751 | NPGLWILGCHNSDFRNRGMTA |
| | | | 752 | ENPGLWILGCHNSDFRNRGMT |
| | | | 753 | MENPGLWILGCHNSDFRNRGM |
| | | | 754 | SMENPGLWILGCHNSDFRNRG |
| | | | 755 | MSMENPGLWILGCHNSDFRNR |
| | | | 756 | FMSMENPGLWILGCHNSDFRN |
| | | | 757 | VFMSMENPGLWILGCHNSDFR |
| | | | 758 | TVFMSMENPGLWILGCHNSDF |
| | | | 759 | ETVFMSMENPGLWILGCHNSD |
| | | | 760 | GETVFMSMENPGLWILGCHNS |
| | | | 761 | SGETVFMSMENPGLWILGCHN |
| | | | 762 | FSGETVFMSMENPGLWILGCH |
| | | | 763 | PFSGETVFMSMENPGLWILGC |
| | | | 764 | FPFSGETVFMSMENPGLWILG |
| | | | 765 | LFPFSGETVFMSMENPGLWIL |
| | | | 766 | TLFPFSGETVFMSMENPGLWI |
| | | | 767 | LTLFPFSGETVFMSMENPGLW |
| | | | 768 | TLTLFPFSGETVFMSMENPGL |
| | | | 769 | DTLTLFPFSGETVFMSMENPG |

TABLE 38

| | Missense | | | |
|---|---|---|---|---|
| Reference Locus | Nucleotide | FVIIIrp/sFVIII | SEQ | |
| Position within | Change | amino acid | ID | |
| FVIIIrp | (wt/sFVIII) | difference | NO: | TIP Set |
| 701 | GGC/GAC | Gly/Asp | 770 | GMTALLKVSSCDKNTGDYYED |
| | | | 771 | RGMTALLKVSSCDKNTGDYYE |
| | | | 772 | NRGMTALLKVSSCDKNTGDYY |
| | | | 773 | RNRGMTALLKVSSCDKNTGDY |
| | | | 774 | FRNRGMTALLKVSSCDKNTGD |
| | | | 775 | DFRNRGMTALLKVSSCDKNTG |
| | | | 776 | SDFRNRGMTALLKVSSCDKNT |
| | | | 777 | NSDFRNRGMTALLKVSSCDKN |
| | | | 778 | HNSDFRNRGMTALLKVSSCDK |
| | | | 779 | CHNSDFRNRGMTALLKVSSCD |
| | | | 780 | GCHNSDFRNRGMTALLKVSSC |
| | | | 781 | LGCHNSDFRNRGMTALLKVSS |
| | | | 782 | ILGCHNSDFRNRGMTALLKVS |
| | | | 783 | WILGCHNSDFRNRGMTALLKV |
| | | | 784 | LWILGCHNSDFRNRGMTALLK |
| | | | 785 | GLWILGCHNSDFRNRGMTALL |
| | | | 786 | PGLWILGCHNSDFRNRGMTAL |
| | | | 787 | NPGLWILGCHNSDFRNRGMTA |
| | | | 788 | ENPGLWILGCHNSDFRNRGMT |
| | | | 789 | MENPGLWILGCHNSDFRNRGM |
| | | | 790 | SMENPGLWILGCHNSDFRNRG |

TABLE 39

| | Missense | | | |
|---|---|---|---|---|
| Reference Locus | Nucleotide | FVIIIrp/sFVIII | SEQ | |
| Position within | Change | amino acid | ID | |
| FVIIIrp | (wt/sFVIII) | difference | NO: | TIP Set |
| 708 | GTT/TTT | Val/Phe | 791 | VSSCDKNTGDYYEDSYEDISA |
| | | | 792 | KVSSCDKNTGDYYEDSYEDIS |
| | | | 793 | LKVSSCDKNTGDYYEDSYEDI |
| | | | 794 | LLKVSSCDKNTGDYYEDSYED |
| | | | 795 | ALLKVSSCDKNTGDYYEDSYE |
| | | | 796 | TALLKVSSCDKNTGDYYEDSY |
| | | | 797 | MTALLKVSSCDKNTGDYYEDS |
| | | | 798 | GMTALLKVSSCDKNTGDYYED |
| | | | 799 | RGMTALLKVSSCDKNTGDYYE |
| | | | 800 | NRGMTALLKVSSCDKNTGDYY |
| | | | 801 | RNRGMTALLKVSSCDKNTGDY |
| | | | 802 | FRNRGMTALLKVSSCDKNTGD |
| | | | 803 | DFRNRGMTALLKVSSCDKNTG |
| | | | 804 | SDFRNRGMTALLKVSSCDKNT |
| | | | 805 | NSDFRNRGMTALLKVSSCDKN |
| | | | 806 | HNSDFRNRGMTALLKVSSCDK |
| | | | 807 | CHNSDFRNRGMTALLKVSSCD |
| | | | 808 | GCHNSDFRNRGMTALLKVSSC |
| | | | 809 | LGCHNSDFRNRGMTALLKVSS |
| | | | 810 | ILGCHNSDFRNRGMTALLKVS |
| | | | 811 | WILGCHNSDFRNRGMTALLKV |

TABLE 40

| | Missense | | | |
|---|---|---|---|---|
| Reference Locus | Nucleotide | FVIIIrp/sFVIII | SEQ | |
| Position within | Change | amino acid | ID | |
| FVIIIrp | (wt/sFVIII) | difference | NO: | TIP Set |
| 731 | CTG/GTG | Leu/Val | 812 | LSKNNAIEPRSFSQNSRHPST |
| | | | 813 | LLSKNNAIEPRSFSQNSRHPS |
| | | | 814 | YLLSKNNAIEPRSFSQNSRHP |
| | | | 815 | AYLLSKNNAIEPRSFSQNSRH |
| | | | 816 | SAYLLSKNNAIEPRSFSQNSR |
| | | | 817 | ISAYLLSKNNAIEPRSFSQNS |
| | | | 818 | DISAYLLSKNNAIEPRSFSQN |
| | | | 819 | EDISAYLLSKNNAIEPRSFSQ |
| | | | 820 | YEDISAYLLSKNNAIEPRSFS |
| | | | 821 | SYEDISAYLLSKNNAIEPRSF |
| | | | 822 | DSYEDISAYLLSKNNAIEPRS |
| | | | 823 | EDSYEDISAYLLSKNNAIEPR |
| | | | 824 | YEDSYEDISAYLLSKNNAIEP |
| | | | 825 | YYEDSYEDISAYLLSKNNAIE |
| | | | 826 | DYYEDSYEDISAYLLSKNNAI |
| | | | 827 | GDYYEDSYEDISAYLLSKNNA |
| | | | 828 | TGDYYEDSYEDISAYLLSKNN |
| | | | 829 | NTGDYYEDSYEDISAYLLSKN |
| | | | 830 | KNTGDYYEDSYEDISAYLLSK |
| | | | 831 | DKNTGDYYEDSYEDISAYLLS |
| | | | 832 | CDKNTGDYYEDSYEDISAYLL |

TABLE 41

| | Missense | | | |
|---|---|---|---|---|
| Reference Locus | Nucleotide | FVIIIrp/sFVIII | SEQ | |
| Position within | Change | amino acid | ID | |
| FVIIIrp | (wt/sFVIII) | difference | NO: | TIP Set |
| 1047 | CAT/TAT | His/Tyr | 833 | HDRMLMDKNATALRLNHMSNK |
| | | | 834 | IHDRMLMDKNATALRLNHMSN |
| | | | 835 | LIHDRMLMDKNATALRLNHMS |
| | | | 836 | PLIHDRMLMDKNATALRLNHM |
| | | | 837 | TPLIHDRMLMDKNATALRLNH |
| | | | 838 | VTPLIHDRMLMDKNATALRLN |
| | | | 839 | KVTPLIHDRMLMDKNATALRL |
| | | | 840 | KKVTPLIHDRMLMDKNATALR |
| | | | 841 | FKKVTPLIHDRMLMDKNATAL |
| | | | 842 | EFKKVTPLIHDRMLMDKNATA |
| | | | 843 | TEFKKVTPLIHDRMLMDKNAT |
| | | | 844 | DTEFKKVTPLIHDRMLMDKNA |
| | | | 845 | SDTEFKKVTPLIHDRMLMDKN |
| | | | 846 | ESDTEFKKVTPLIHDRMLMDK |
| | | | 847 | LESDTEFKKVTPLIHDRMLMD |
| | | | 848 | ILESDTEFKKVTPLIHDRMLM |
| | | | 849 | NILESDTEFKKVTPLIHDRML |
| | | | 850 | QNILESDTEFKKVTPLIHDRM |
| | | | 851 | WQNILESDTEFKKVTPLIHDR |
| | | | 852 | VWQNILESDTEFKKVTPLIHD |
| | | | 853 | SVWQNILESDTEFKKVTPLIH |

TABLE 42

| | Missense | | | |
|---|---|---|---|---|
| Reference Locus | Nucleotide | FVIIIrp/sFVIII | SEQ | |
| Position within | Change | amino acid | ID | |
| FVIIIrp | (wt/sFVIII) | difference | NO: | TIP Set |
| 1732 | AAA/GAA | Lys/Glu | 854 | KVVFQEFTDGSFTQPLYRGEL |
| | | | 855 | KKVVFQEFTDGSFTQPLYRGE |
| | | | 856 | FKKVVFQEFTDGSFTQPLYRG |
| | | | 857 | QFKKVVFQEFTDGSFTQPLYR |
| | | | 858 | PQFKKVVFQEFTDGSFTQPLY |
| | | | 859 | VPQFKKVVFQEFTDGSFTQPL |
| | | | 860 | SVPQFKKVVFQEFTDGSFTQP |
| | | | 861 | GSVPQFKKVVFQEFTDGSFTQ |
| | | | 862 | SGSVPQFKKVVFQEFTDGSFT |
| | | | 863 | QSGSVPQFKKVVFQEFTDGSF |
| | | | 864 | AQSGSVPQFKKVVFQEFTDGS |
| | | | 865 | RAQSGSVPQFKKVVFQEFTDG |
| | | | 866 | NRAQSGSVPQFKKVVFQEFTD |
| | | | 867 | RNRAQSGSVPQFKKVVFQEFT |
| | | | 868 | LRNRAQSGSVPQFKKVVFQEF |
| | | | 869 | VLRNRAQSGSVPQFKKVVFQE |
| | | | 870 | HVLRNRAQSGSVPQFKKVVFQ |
| | | | 871 | PHVLRNRAQSGSVPQFKKVVF |
| | | | 872 | SPHVLRNRAQSGSVPQFKKVV |
| | | | 873 | SSPHVLRNRAQSGSVPQFKKV |
| | | | 874 | SSSPHVLRNRAQSGSVPQFKK |

TABLE 43

| | Missense | | | |
|---|---|---|---|---|
| Reference Locus | Nucleotide | FVIIIrp/sFVIII | SEQ | |
| Position within | Change | amino acid | ID | |
| FVIIIrp | (wt/sFVIII) | difference | NO: | TIP Set |
| 1760 | GGG/GAG | Gly/Glu | 875 | GPYIRAEVEDNIMVTFRNQAS |
| | | | 876 | LGPYIRAEVEDNIMVTFRNQA |
| | | | 877 | LLGPYIRAEVEDNIMVTFRNQ |
| | | | 878 | GLLGPYIRAEVEDNIMVTFRN |
| | | | 879 | LGLLGPYIRAEVEDNIMVTFR |
| | | | 880 | HLGLLGPYIRAEVEDNIMVTF |
| | | | 881 | EHLGLLGPYIRAEVEDNIMVT |
| | | | 882 | NEHLGLLGPYIRAEVEDNIMV |
| | | | 883 | LNEHLGLLGPYIRAEVEDNIM |
| | | | 884 | ELNEHLGLLGPYIRAEVEDNI |
| | | | 885 | GELNEHLGLLGPYIRAEVEDN |
| | | | 886 | RGELNEHLGLLGPYIRAEVED |
| | | | 887 | YRGELNEHLGLLGPYIRAEVE |
| | | | 888 | LYRGELNEHLGLLGPYIRAEV |
| | | | 889 | PLYRGELNEHLGLLGPYIRAE |
| | | | 890 | QPLYRGELNEHLGLLGPYIRA |
| | | | 891 | TQPLYRGELNEHLGLLGPYIR |
| | | | 892 | FTQPLYRGELNEHLGLLGPYI |
| | | | 893 | SFTQPLYRGELNEHLGLLGPY |
| | | | 894 | GSFTQPLYRGELNEHLGLLGP |
| | | | 895 | DGSFTQPLYRGELNEHLGLLG |

TABLE 44

| | Missense | | | |
|---|---|---|---|---|
| Reference Locus | Nucleotide | FVIIIrp/sFVIII | SEQ | |
| Position within | Change | amino acid | ID | |
| FVIIIrp | (wt/sFVIII) | difference | NO: | TIP Set |
| 1761 | CCA/CAA | Pro/Gln | 896 | PYIRAEVEDNIMVTFRNQASR |
| | | | 897 | GPYIRAEVEDNIMVTFRNQAS |
| | | | 898 | LGPYIRAEVEDNIMVTFRNQA |
| | | | 899 | LLGPYIRAEVEDNIMVTFRNQ |
| | | | 900 | GLLGPYIRAEVEDNIMVTFRN |
| | | | 901 | LGLLGPYIRAEVEDNIMVTFR |
| | | | 902 | HLGLLGPYIRAEVEDNIMVTF |
| | | | 903 | EHLGLLGPYIRAEVEDNIMVT |
| | | | 904 | NEHLGLLGPYIRAEVEDNIMV |
| | | | 905 | LNEHLGLLGPYIRAEVEDNIM |
| | | | 906 | ELNEHLGLLGPYIRAEVEDNI |
| | | | 907 | GELNEHLGLLGPYIRAEVEDN |
| | | | 908 | RGELNEHLGLLGPYIRAEVED |
| | | | 909 | YRGELNEHLGLLGPYIRAEVE |
| | | | 910 | LYRGELNEHLGLLGPYIRAEV |
| | | | 911 | PLYRGELNEHLGLLGPYIRAE |
| | | | 912 | QPLYRGELNEHLGLLGPYIRA |
| | | | 913 | TQPLYRGELNEHLGLLGPYIR |
| | | | 914 | FTQPLYRGELNEHLGLLGPYI |
| | | | 915 | SFTQPLYRGELNEHLGLLGPY |
| | | | 916 | GSFTQPLYRGELNEHLGLLGP |

TABLE 45

| | Missense | | | |
|---|---|---|---|---|
| Reference Locus | Nucleotide | FVIIIrp/sFVIII | SEQ | |
| Position within | Change | amino acid | ID | |
| FVIIIrp | (wt/sFVIII) | difference | NO: | TIP Set |
| 1779 | GCC/CCC | Ala/Pro | 917 | ASRPYSFYSSLISYEEDQRQG |
| | | | 918 | QASRPYSFYSSLISYEEDQRQ |
| | | | 919 | NQASRPYSFYSSLISYEEDQR |
| | | | 920 | RNQASRPYSFYSSLISYEEDQ |
| | | | 921 | FRNQASRPYSFYSSLISYEED |
| | | | 922 | TFRNQASRPYSFYSSLISYEE |
| | | | 923 | VTFRNQASRPYSFYSSLISYE |
| | | | 924 | MVTFRNQASRPYSFYSSLISY |
| | | | 925 | IMVTFRNQASRPYSFYSSLIS |
| | | | 926 | NIMVTFRNQASRPYSFYSSLI |
| | | | 927 | DNIMVTFRNQASRPYSFYSSL |
| | | | 928 | EDNIMVTFRNQASRPYSFYSS |
| | | | 929 | VEDNIMVTFRNQASRPYSFYS |
| | | | 930 | EVEDNIMVTFRNQASRPYSFY |
| | | | 931 | AEVEDNIMVTFRNQASRPYSF |
| | | | 932 | RAEVEDNIMVTFRNQASRPYS |
| | | | 933 | IRAEVEDNIMVTFRNQASRPY |
| | | | 934 | YIRAEVEDNIMVTFRNQASRP |
| | | | 935 | PYIRAEVEDNIMVTFRNQASR |
| | | | 936 | GPYIRAEVEDNIMVTFRNQAS |
| | | | 937 | LGPYIRAEVEDNIMVTFRNQA |

TABLE 46

| | Missense | | | |
|---|---|---|---|---|
| Reference Locus | Nucleotide | FVIIIrp/sFVIII | SEQ | |
| Position within | Change | amino acid | ID | |
| FVIIIrp | (wt/sFVIII) | difference | NO: | TIP Set |
| 1781 | CGT/CAT | Arg/His | 938 | RPYSFYSSLISYEEDQRQGAE |
| | | | 939 | SRPYSFYSSLISYEEDQRQGA |
| | | | 940 | ASRPYSFYSSLISYEEDQRQG |
| | | | 941 | QASRPYSFYSSLISYEEDQRQ |
| | | | 942 | NQASRPYSFYSSLISYEEDQR |
| | | | 943 | RNQASRPYSFYSSLISYEEDQ |
| | | | 944 | FRNQASRPYSFYSSLISYEED |
| | | | 945 | TFRNQASRPYSFYSSLISYEE |
| | | | 946 | VTFRNQASRPYSFYSSLISYE |
| | | | 947 | MVTFRNQASRPYSFYSSLISY |
| | | | 948 | IMVTFRNQASRPYSFYSSLIS |
| | | | 949 | NIMVTFRNQASRPYSFYSSLI |
| | | | 950 | DNIMVTFRNQASRPYSFYSSL |
| | | | 951 | EDNIMVTFRNQASRPYSFYSS |
| | | | 952 | VEDNIMVTFRNQASRPYSFYS |
| | | | 953 | EVEDNIMVTFRNQASRPYSFY |
| | | | 954 | AEVEDNIMVTFRNQASRPYSF |
| | | | 955 | RAEVEDNIMVTFRNQASRPYS |
| | | | 956 | IRAEVEDNIMVTFRNQASRPY |
| | | | 957 | YIRAEVEDNIMVTFRNQASRP |
| | | | 958 | PYIRAEVEDNIMVTFRNQASR |

TABLE 47

| | Missense | | | |
|---|---|---|---|---|
| Reference Locus | Nucleotide | FVIIIrp/sFVIII | SEQ | |
| Position within | Change | amino acid | ID | |
| FVIIIrp | (wt/sFVIII) | difference | NO: | TIP Set |
| 1786 | TAT/TCT | Tyr/Ser | 959 | YSSLISYEEDQRQGAEPRKNF |
| | | | 960 | FYSSLISYEEDQRQGAEPRKN |
| | | | 961 | SFYSSLISYEEDQRQGAEPRK |
| | | | 962 | YSFYSSLISYEEDQRQGAEPR |
| | | | 963 | PYSFYSSLISYEEDQRQGAEP |
| | | | 964 | RPYSFYSSLISYEEDQRQGAE |
| | | | 965 | SRPYSFYSSLISYEEDQRQGA |
| | | | 966 | ASRPYSFYSSLISYEEDQRQG |
| | | | 967 | QASRPYSFYSSLISYEEDQRQ |
| | | | 968 | NQASRPYSFYSSLISYEEDQR |
| | | | 969 | RNQASRPYSFYSSLISYEEDQ |
| | | | 970 | FRNQASRPYSFYSSLISYEED |
| | | | 971 | TFRNQASRPYSFYSSLISYEE |
| | | | 972 | VTFRNQASRPYSFYSSLISYE |
| | | | 973 | MVTFRNQASRPYSFYSSLISY |
| | | | 974 | IMVTFRNQASRPYSFYSSLIS |
| | | | 975 | NIMVTFRNQASRPYSFYSSLI |
| | | | 976 | DNIMVTFRNQASRPYSFYSSL |
| | | | 977 | EDNIMVTFRNQASRPYSFYSS |
| | | | 978 | VEDNIMVTFRNQASRPYSFYS |
| | | | 979 | EVEDNIMVTFRNQASRPYSFY |

TABLE 48

| | Missense | | | |
|---|---|---|---|---|
| Reference Locus | Nucleotide | FVIIIrp/sFVIII | SEQ | |
| Position within | Change | amino acid | ID | |
| FVIIIrp | (wt/sFVIII) | difference | NO: | TIP Set |
| 1828 | GAT/GGT | Asp/Gly | 980 | DEFDCKAWAYFSDVDLEKDVH |
| | | | 981 | KDEFDCKAWAYFSDVDLEKDV |
| | | | 982 | TKDEFDCKAWAYFSDVDLEKD |
| | | | 983 | PTKDEFDCKAWAYFSDVDLEK |
| | | | 984 | APTKDEFDCKAWAYFSDVDLE |
| | | | 985 | MAPTKDEFDCKAWAYFSDVDL |
| | | | 986 | HMAPTKDEFDCKAWAYFSDVD |
| | | | 987 | HHMAPTKDEFDCKAWAYFSDV |
| | | | 988 | QHHMAPTKDEFDCKAWAYFSD |
| | | | 989 | VQHHMAPTKDEFDCKAWAYFS |
| | | | 990 | KVQHHMAPTKDEFDCKAWAYF |
| | | | 991 | WKVQHHMAPTKDEFDCKAWAY |
| | | | 992 | FWKVQHHMAPTKDEFDCKAWA |
| | | | 993 | YFWKVQHHMAPTKDEFDCKAW |
| | | | 994 | TYFWKVQHHMAPTKDEFDCKA |
| | | | 995 | KTYFWKVQHHMAPTKDEFDCK |
| | | | 996 | TKTYFWKVQHHMAPTKDEFDC |
| | | | 997 | ETKTYFWKVQHHMAPTKDEFD |
| | | | 998 | NETKTYFWKVQHHMAPTKDEF |
| | | | 999 | PNETKTYFWKVQHHMAPTKDE |
| | | | 1000 | KPNETKTYFWKVQHHMAPTKD |

TABLE 49

| | Missense | | | |
|---|---|---|---|---|
| Reference Locus | Nucleotide | FVIIIrp/sFVIII | SEQ | |
| Position within | Change | amino acid | ID | |
| FVIIIrp | (wt/sFVIII) | difference | NO: | TIP Set |
| 1854 | CCC/CTC | Pro/Leu | 1001 | PLLVCHTNTLNPAHGRQVTVQ |
| | | | 1002 | GPLLVCHTNTLNPAHGRQVTV |
| | | | 1003 | IGPLLVCHTNTLNPAHGRQVT |
| | | | 1004 | LIGPLLVCHTNTLNPAHGRQV |
| | | | 1005 | GLIGPLLVCHTNTLNPAHGRQ |
| | | | 1006 | SGLIGPLLVCHTNTLNPAHGR |
| | | | 1007 | HSGLIGPLLVCHTNTLNPAHG |
| | | | 1008 | VHSGLIGPLLVCHTNTLNPAH |
| | | | 1009 | DVHSGLIGPLLVCHTNTLNPA |
| | | | 1010 | KDVHSGLIGPLLVCHTNTLNP |
| | | | 1011 | EKDVHSGLIGPLLVCHTNTLN |
| | | | 1012 | LEKDVHSGLIGPLLVCHTNTL |
| | | | 1013 | DLEKDVHSGLIGPLLVCHTNT |
| | | | 1014 | VDLEKDVHSGLIGPLLVCHTN |
| | | | 1015 | DVDLEKDVHSGLIGPLLVCHT |
| | | | 1016 | SDVDLEKDVHSGLIGPLLVCH |
| | | | 1017 | FSDVDLEKDVHSGLIGPLLVC |
| | | | 1018 | YFSDVDLEKDVHSGLIGPLLV |
| | | | 1019 | AYFSDVDLEKDVHSGLIGPLL |
| | | | 1020 | WAYFSDVDLEKDVHSGLIGPL |
| | | | 1021 | AWAYFSDVDLEKDVHSGLIGP |

TABLE 50

| | Missense | | | |
|---|---|---|---|---|
| Reference Locus | Nucleotide | FVIIIrp/sFVIII | SEQ | |
| Position within | Change | amino acid | ID | |
| FVIIIrp | (wt/sFVIII) | difference | NO: | TIP Set |
| 1890 | TAC/TGC | Tyr/Cys | 1022 | YFTENMERNCRAPCNIQMEDP |
| | | | 1023 | WYFTENMERNCRAPCNIQMED |
| | | | 1024 | SWYFTENMERNCRAPCNIQME |
| | | | 1025 | KSWYFTENMERNCRAPCNIQM |
| | | | 1026 | TKSWYFTENMERNCRAPCNIQ |
| | | | 1027 | ETKSWYFTENMERNCRAPCNI |
| | | | 1028 | DETKSWYFTENMERNCRAPCN |
| | | | 1029 | FDETKSWYFTENMERNCRAPC |
| | | | 1030 | IFDETKSWYFTENMERNCRAP |
| | | | 1031 | TIFDETKSWYFTENMERNCRA |
| | | | 1032 | FTIFDETKSWYFTENMERNCR |
| | | | 1033 | FFTIFDETKSWYFTENMERNC |
| | | | 1034 | LFFTIFDETKSWYFTENMERN |
| | | | 1035 | ALFFTIFDETKSWYFTENMER |
| | | | 1036 | FALFFTIFDETKSWYFTENME |
| | | | 1037 | EFALFFTIFDETKSWYFTENM |
| | | | 1038 | QEFALFFTIFDETKSWYFTEN |
| | | | 1039 | VQEFALFFTIFDETKSWYFTE |
| | | | 1040 | TVQEFALFFTIFDETKSWYFT |
| | | | 1041 | VTVQEFALFFTIFDETKSWYF |
| | | | 1042 | QVTVQEFALFFTIFDETKSWY |

TABLE 51

| | Missense | | | |
|---|---|---|---|---|
| Reference Locus | Nucleotide | FVIIIrp/sFVIII | SEQ | |
| Position within | Change | amino acid | ID | |
| FVIIIrp | (wt/sFVIII) | difference | NO: | TIP Set |
| 1920 | GCA/GAA | Ala/Glu | 1043 | AINGYIMDTLPGLVMAQDQRI |
| | | | 1044 | HAINGYIMDTLPGLVMAQDQR |
| | | | 1045 | FHAINGYIMDTLPGLVMAQDQ |
| | | | 1046 | RFHAINGYIMDTLPGLVMAQD |
| | | | 1047 | YRFHAINGYIMDTLPGLVMAQ |
| | | | 1048 | NYRFHAINGYIMDTLPGLVMA |
| | | | 1049 | ENYRFHAINGYIMDTLPGLVM |
| | | | 1050 | KENYRFHAINGYIMDTLPGLV |
| | | | 1051 | FKENYRFHAINGYIMDTLPGL |
| | | | 1052 | TFKENYRFHAINGYIMDTLPG |
| | | | 1053 | PTFKENYRFHAINGYIMDTLP |
| | | | 1054 | DPTFKENYRFHAINGYIMDTL |
| | | | 1055 | EDPTFKENYRFHAINGYIMDT |
| | | | 1056 | MEDPTFKENYRFHAINGYIMD |
| | | | 1057 | QMEDPTFKENYRFHAINGYIM |
| | | | 1058 | IQMEDPTFKENYRFHAINGYI |
| | | | 1059 | NIQMEDPTFKENYRFHAINGY |
| | | | 1060 | CNIQMEDPTFKENYRFHAING |
| | | | 1061 | PCNIQMEDPTFKENYRFHAIN |
| | | | 1062 | APCNIQMEDPTFKENYRFHAI |
| | | | 1063 | RAPCNIQMEDPTFKENYRFHA |

TABLE 52

| | Missense | | | |
|---|---|---|---|---|
| Reference Locus | Nucleotide | FVIIIrp/sFVIII | SEQ | |
| Position within | Change | amino acid | ID | |
| FVIIIrp | (wt/sFVIII) | difference | NO: | TIP Set |
| 1920 | GCA/GTA | Ala/Val | 1064 | AINGYIMDTLPGLVMAQDQRI |
| | | | 1065 | HAINGYIMDTLPGLVMAQDQR |
| | | | 1066 | FHAINGYIMDTLPGLVMAQDQ |
| | | | 1067 | RFHAINGYIMDTLPGLVMAQD |
| | | | 1068 | YRFHAINGYIMDTLPGLVMAQ |
| | | | 1069 | NYRFHAINGYIMDTLPGLVMA |
| | | | 1070 | ENYRFHAINGYIMDTLPGLVM |
| | | | 1071 | KENYRFHAINGYIMDTLPGLV |
| | | | 1072 | FKENYRFHAINGYIMDTLPGL |
| | | | 1073 | TFKENYRFHAINGYIMDTLPG |
| | | | 1074 | PTFKENYRFHAINGYIMDTLP |
| | | | 1075 | DPTFKENYRFHAINGYIMDTL |
| | | | 1076 | EDPTFKENYRFHAINGYIMDT |
| | | | 1077 | MEDPTFKENYRFHAINGYIMD |
| | | | 1078 | QMEDPTFKENYRFHAINGYIM |
| | | | 1079 | IQMEDPTFKENYRFHAINGYI |
| | | | 1080 | NIQMEDPTFKENYRFHAINGY |
| | | | 1081 | CNIQMEDPTFKENYRFHAING |
| | | | 1082 | PCNIQMEDPTFKENYRFHAIN |
| | | | 1083 | APCNIQMEDPTFKENYRFHAI |
| | | | 1084 | RAPCNIQMEDPTFKENYRFHA |

TABLE 53

| | Missense | | | |
|---|---|---|---|---|
| Reference Locus | Nucleotide | FVIIIrp/sFVIII | SEQ | |
| Position within | Change | amino acid | ID | |
| FVIIIrp | (wt/sFVIII) | difference | NO: | TIP Set |
| 1922 | AAT/GAT | Asn/Asp | 1085 | NGYIMDTLPGLVMAQDQRIRW |
| | | | 1086 | INGYIMDTLPGLVMAQDQRIR |
| | | | 1087 | AINGYIMDTLPGLVMAQDQRI |
| | | | 1088 | HAINGYIMDTLPGLVMAQDQR |
| | | | 1089 | FHAINGYIMDTLPGLVMAQDQ |
| | | | 1090 | RFHAINGYIMDTLPGLVMAQD |
| | | | 1091 | YRFHAINGYIMDTLPGLVMAQ |
| | | | 1092 | NYRFHAINGYIMDTLPGLVMA |
| | | | 1093 | ENYRFHAINGYIMDTLPGLVM |
| | | | 1094 | KENYRFHAINGYIMDTLPGLV |
| | | | 1095 | FKENYRFHAINGYIMDTLPGL |
| | | | 1096 | TFKENYRFHAINGYIMDTLPG |
| | | | 1097 | PTFKENYRFHAINGYIMDTLP |
| | | | 1098 | DPTFKENYRFHAINGYIMDTL |
| | | | 1099 | EDPTFKENYRFHAINGYIMDT |
| | | | 1100 | MEDPTFKENYRFHAINGYIMD |
| | | | 1101 | QMEDPTFKENYRFHAINGYIM |
| | | | 1102 | IQMEDPTFKENYRFHAINGYI |
| | | | 1103 | NIQMEDPTFKENYRFHAINGY |
| | | | 1104 | CNIQMEDPTFKENYRFHAING |
| | | | 1105 | PCNIQMEDPTFKENYRFHAIN |

TABLE 54

| | Missense | | | |
|---|---|---|---|---|
| Reference Locus | Nucleotide | FVIIIrp/sFVIII | SEQ | |
| Position within | Change | amino acid | ID | |
| FVIIIrp | (wt/sFVIII) | difference | NO: | TIP Set |
| 1923 | GGC/GAC | Gly/Asp | 1106 | GYIMDTLPGLVMAQDQRIRWY |
| | | | 1107 | NGYIMDTLPGLVMAQDQRIRW |
| | | | 1108 | INGYIMDTLPGLVMAQDQRIR |
| | | | 1109 | AINGYIMDTLPGLVMAQDQRI |
| | | | 1110 | HAINGYIMDTLPGLVMAQDQR |
| | | | 1111 | FHAINGYIMDTLPGLVMAQDQ |
| | | | 1112 | RFHAINGYIMDTLPGLVMAQD |
| | | | 1113 | YRFHAINGYIMDTLPGLVMAQ |
| | | | 1114 | NYRFHAINGYIMDTLPGLVMA |
| | | | 1115 | ENYRFHAINGYIMDTLPGLVM |
| | | | 1116 | KENYRFHAINGYIMDTLPGLV |
| | | | 1117 | FKENYRFHAINGYIMDTLPGL |
| | | | 1118 | TFKENYRFHAINGYIMDTLPG |
| | | | 1119 | PTFKENYRFHAINGYIMDTLP |
| | | | 1120 | DPTFKENYRFHAINGYIMDTL |
| | | | 1121 | EDPTFKENYRFHAINGYIMDT |
| | | | 1122 | MEDPTFKENYRFHAINGYIMD |
| | | | 1123 | QMEDPTFKENYRFHAINGYIM |
| | | | 1124 | IQMEDPTFKENYRFHAINGYI |
| | | | 1125 | NIQMEDPTFKENYRFHAINGY |
| | | | 1126 | CNIQMEDPTFKENYRFHAING |

TABLE 55

| | Missense | | | |
|---|---|---|---|---|
| Reference Locus | Nucleotide | FVIIIrp/sFVIII | SEQ | |
| Position within | Change | amino acid | ID | |
| FVIIIrp | (wt/sFVIII) | difference | NO: | TIP Set |
| 1952 | AAC/ACC | Asn/Thr | 1127 | NIHSIHFSGHVFTVRKKEEYK |
| | | | 1128 | ENIHSIHFSGHVFTVRKKEEY |
| | | | 1129 | NENIHSIHFSGHVFTVRKKEE |
| | | | 1130 | ENENIHSIHFSGHVFTVRKKE |
| | | | 1131 | GSNENIHSIHFSGHVFTVRKK |
| | | | 1132 | MGSNENIHSIHFSGHVFTVRK |
| | | | 1133 | SMGSNENIHSIHFSGHVFTVR |
| | | | 1134 | LSMGSNENIHSIHFSGHVFTV |
| | | | 1135 | LLSMGSNENIHSIHFSGHVFT |
| | | | 1136 | YLLSMGSNENIHSIHFSGHVF |
| | | | 1137 | WYLLSMGSNENIHSIHFSGHV |
| | | | 1138 | RWYLLSMGSNENIHSIHFSGH |
| | | | 1139 | IRWYLLSMGSNENIHSIHFSG |
| | | | 1140 | RIRWYLLSMGSNENIHSIHFS |
| | | | 1141 | QRIRWYLLSMGSNENIHSIHF |
| | | | 1142 | DQRIRWYLLSMGSNENIHSIH |
| | | | 1143 | QDQRIRWYLLSMGSNENIHSI |
| | | | 1144 | AQDQRIRWYLLSMGSNENIHS |
| | | | 1145 | MAQDQRIRWYLLSMGSNENIH |
| | | | 1146 | VMAQDQRIRWYLLSMGSNENI |
| | | | 1147 | LVMAQDQRIRWYLLSMGSNEN |

TABLE 56

| | Missense | | | |
|---|---|---|---|---|
| Reference Locus | Nucleotide | FVIIIrp/sFVIII | SEQ | |
| Position within | Change | amino acid | ID | |
| FVIIIrp | (wt/sFVIII) | difference | NO: | TIP Set |
| 1981 | GGT/GCT | Gly/Ala | 1148 | GVFETVEMLPSKAGIWRVECL |
| | | | 1149 | PGVFETVEMLPSKAGIWRVEC |
| | | | 1150 | YPGVFETVEMLPSKAGIWRVE |
| | | | 1151 | LYPGVFETVEMLPSKAGIWRV |
| | | | 1152 | NLYPGVFETVEMLPSKAGIWR |
| | | | 1153 | YNLYPGVFETVEMLPSKAGIW |
| | | | 1154 | LYNLYPGVFETVEMLPSKAGI |
| | | | 1155 | ALYNLYPGVFETVEMLPSKAG |
| | | | 1156 | MALYNLYPGVFETVEMLPSKA |
| | | | 1157 | KMALYNLYPGVFETVEMLPSK |
| | | | 1158 | YKMALYNLYPGVFETVEMLPS |
| | | | 1159 | EYKMALYNLYPGVFETVEMLP |
| | | | 1160 | EEYKMALYNLYPGVFETVEML |
| | | | 1161 | KEEYKMALYNLYPGVFETVEM |
| | | | 1162 | KKEEYKMALYNLYPGVFETVE |
| | | | 1163 | RKKEEYKMALYNLYPGVFETV |
| | | | 1164 | VRKKEEYKMALYNLYPGVFET |
| | | | 1165 | TVRKKEEYKMALYNLYPGVFE |
| | | | 1166 | FTVRKKEEYKMALYNLYPGVF |
| | | | 1167 | VFTVRKKEEYKMALYNLYPGV |
| | | | 1168 | HVFTVRKKEEYKMALYNLYPG |

TABLE 57

| | Missense | | | |
|---|---|---|---|---|
| Reference Locus | Nucleotide | FVIIIrp/sFVIII | SEQ | |
| Position within | Change | amino acid | ID | |
| FVIIIrp | (wt/sFVIII) | difference | NO: | TIP Set |
| 1997 | CGG/CCG | Arg/Pro | 1169 | RVECLIGEHLHAGMSTLFLVY |
| | | | 1170 | WRVECLIGEHLHAGMSTLFLV |
| | | | 1171 | IWRVECLIGEHLHAGMSTLFL |
| | | | 1172 | GIWRVECLIGEHLHAGMSTLF |
| | | | 1173 | AGIWRVECLIGEHLHAGMSTL |
| | | | 1174 | KAGIWRVECLIGEHLHAGMST |
| | | | 1175 | SKAGIWRVECLIGEHLHAGMS |
| | | | 1176 | PSKAGIWRVECLIGEHLHAGM |
| | | | 1177 | LPSKAGIWRVECLIGEHLHAG |
| | | | 1178 | MLPSKAGIWRVECLIGEHLHA |
| | | | 1179 | EMLPSKAGIWRVECLIGEHLH |
| | | | 1180 | VEMLPSKAGIWRVECLIGEHL |
| | | | 1181 | TVEMLPSKAGIWRVECLIGEH |
| | | | 1182 | ETVEMLPSKAGIWRVECLIGE |
| | | | 1183 | FETVEMLPSKAGIWRVECLIG |
| | | | 1184 | VFETVEMLPSKAGIWRVECLI |
| | | | 1185 | GVFETVEMLPSKAGIWRVECL |
| | | | 1186 | PGVFETVEMLPSKAGIWRVEC |
| | | | 1187 | YPGVFETVEMLPSKAGIWRVE |
| | | | 1188 | LYPGVFETVEMLPSKAGIWRV |
| | | | 1189 | NLYPGVFETVEMLPSKAGIWR |

TABLE 58

| | Missense | | | |
|---|---|---|---|---|
| Reference Locus | Nucleotide | FVIIIrp/sFVIII | SEQ | |
| Position within | Change | amino acid | ID | |
| FVIIIrp | (wt/sFVIII) | difference | NO: | TIP Set |
| 1997 | CGG/TGG | Arg/Trp | 1190 | RVECLIGEHLHAGMSTLFLVY |
| | | | 1191 | WRVECLIGEHLHAGMSTLFLV |
| | | | 1192 | IWRVECLIGEHLHAGMSTLFL |
| | | | 1193 | GIWRVECLIGEHLHAGMSTLF |
| | | | 1194 | AGIWRVECLIGEHLHAGMSTL |
| | | | 1195 | KAGIWRVECLIGEHLHAGMST |
| | | | 1196 | SKAGIWRVECLIGEHLHAGMS |
| | | | 1197 | PSKAGIWRVECLIGEHLHAGM |
| | | | 1198 | LPSKAGIWRVECLIGEHLHAG |
| | | | 1199 | MLPSKAGIWRVECLIGEHLHA |
| | | | 1200 | EMLPSKAGIWRVECLIGEHLH |
| | | | 1201 | VEMLPSKAGIWRVECLIGEHL |
| | | | 1202 | TVEMLPSKAGIWRVECLIGEH |
| | | | 1203 | ETVEMLPSKAGIWRVECLIGE |
| | | | 1204 | FETVEMLPSKAGIWRVECLIG |
| | | | 1205 | VFETVEMLPSKAGIWRVECLI |
| | | | 1206 | GVFETVEMLPSKAGIWRVECL |
| | | | 1207 | PGVFETVEMLPSKAGIWRVEC |
| | | | 1208 | YPGVFETVEMLPSKAGIWRVE |
| | | | 1209 | LYPGVFETVEMLPSKAGIWRV |
| | | | 1210 | NLYPGVFETVEMLPSKAGIWR |

TABLE 59

| | Missense | | | |
|---|---|---|---|---|
| Reference Locus | Nucleotide | FVIIIrp/sFVIII | SEQ | |
| Position within | Change | amino acid | ID | |
| FVIIIrp | (wt/sFVIII) | difference | NO: | TIP Set |
| 1999 | GAA/GGA | Glu/Gly | 1211 | ECLIGEHLHAGMSTLFLVYSN |
| | | | 1212 | VECLIGEHLHAGMSTLFLVYS |
| | | | 1213 | RVECLIGEHLHAGMSTLFLVY |
| | | | 1214 | WRVECLIGEHLHAGMSTLFLV |
| | | | 1215 | IWRVECLIGEHLHAGMSTLFL |
| | | | 1216 | GIWRVECLIGEHLHAGMSTLF |
| | | | 1217 | AGIWRVECLIGEHLHAGMSTL |
| | | | 1218 | KAGIWRVECLIGEHLHAGMST |
| | | | 1219 | SKAGIWRVECLIGEHLHAGMS |
| | | | 1220 | PSKAGIWRVECLIGEHLHAGM |
| | | | 1221 | LPSKAGIWRVECLIGEHLHAG |
| | | | 1222 | MLPSKAGIWRVECLIGEHLHA |
| | | | 1223 | EMLPSKAGIWRVECLIGEHLH |
| | | | 1224 | VEMLPSKAGIWRVECLIGEHL |
| | | | 1225 | TVEMLPSKAGIWRVECLIGEH |
| | | | 1226 | ETVEMLPSKAGIWRVECLIGE |
| | | | 1227 | FETVEMLPSKAGIWRVECLIG |
| | | | 1228 | VFETVEMLPSKAGIWRVECLI |
| | | | 1229 | GVFETVEMLPSKAGIWRVECL |
| | | | 1230 | PGVFETVEMLPSKAGIWRVEC |
| | | | 1231 | YPGVFETVEMLPSKAGIWRVE |

TABLE 60

| | Missense | | | |
|---|---|---|---|---|
| Reference Locus | Nucleotide | FVIIIrp/sFVIII | SEQ | |
| Position within | Change | amino acid | ID | |
| FVIIIrp | (wt/sFVIII) | difference | NO: | TIP Set |
| 2004 | GAG/AAG | Glu/Lys | 1232 | EHLHAGMSTLFLVYSNKCQTP |
| | | | 1233 | GEHLHAGMSTLFLVYSNKCQT |
| | | | 1234 | IGEHLHAGMSTLFLVYSNKCQ |
| | | | 1235 | LIGEHLHAGMSTLFLVYSNKC |
| | | | 1236 | CLIGEHLHAGMSTLFLVYSNK |
| | | | 1237 | ECLIGEHLHAGMSTLFLVYSN |
| | | | 1238 | VECLIGEHLHAGMSTLFLVYS |
| | | | 1239 | RVECLIGEHLHAGMSTLFLVY |
| | | | 1240 | WRVECLIGEHLHAGMSTLFLV |
| | | | 1241 | IWRVECLIGEHLHAGMSTLFL |
| | | | 1242 | GIWRVECLIGEHLHAGMSTLF |
| | | | 1243 | AGIWRVECLIGEHLHAGMSTL |
| | | | 1244 | KAGIWRVECLIGEHLHAGMST |
| | | | 1245 | SKAGIWRVECLIGEHLHAGMS |
| | | | 1246 | PSKAGIWRVECLIGEHLHAGM |
| | | | 1247 | LPSKAGIWRVECLIGEHLHAG |
| | | | 1248 | MLPSKAGIWRVECLIGEHLHA |
| | | | 1249 | EMLPSKAGIWRVECLIGEHLH |
| | | | 1250 | VEMLPSKAGIWRVECLIGEHL |
| | | | 1251 | TVEMLPSKAGIWRVECLIGEH |
| | | | 1252 | ETVEMLPSKAGIWRVECLIGE |

TABLE 61

| | Missense | | | |
|---|---|---|---|---|
| Reference Locus | Nucleotide | FVIIIrp/sFVIII | SEQ | |
| Position within | Change | amino acid | ID | |
| FVIIIrp | (wt/sFVIII) | difference | NO: | TIP Set |
| 2009 | GGG/AGG | Gly/Arg | 1253 | GMSTLFLVYSNKCQTPLGMAS |
| | | | 1254 | AGMSTLFLVYSNKCQTPLGMA |
| | | | 1255 | HAGMSTLFLVYSNKCQTPLGM |
| | | | 1256 | LHAGMSTLFLVYSNKCQTPLG |
| | | | 1257 | HLHAGMSTLFLVYSNKCQTPL |
| | | | 1258 | EHLHAGMSTLFLVYSNKCQTP |
| | | | 1259 | GEHLHAGMSTLFLVYSNKCQT |
| | | | 1260 | IGEHLHAGMSTLFLVYSNKCQ |
| | | | 1261 | LIGEHLHAGMSTLFLVYSNKC |
| | | | 1262 | CLIGEHLHAGMSTLFLVYSNK |
| | | | 1263 | ECLIGEHLHAGMSTLFLVYSN |
| | | | 1264 | VECLIGEHLHAGMSTLFLVYS |
| | | | 1265 | RVECLIGEHLHAGMSTLFLVY |
| | | | 1266 | WRVECLIGEHLHAGMSTLFLV |
| | | | 1267 | IWRVECLIGEHLHAGMSTLFL |
| | | | 1268 | GIWRVECLIGEHLHAGMSTLF |
| | | | 1269 | AGIWRVECLIGEHLHAGMSTL |
| | | | 1270 | KAGIWRVECLIGEHLHAGMST |
| | | | 1271 | SKAGIWRVECLIGEHLHAGMS |
| | | | 1272 | PSKAGIWRVECLIGEHLHAGM |
| | | | 1273 | LPSKAGIWRVECLIGEHLHAG |

TABLE 62

| | Missense | | | |
|---|---|---|---|---|
| Reference Locus | Nucleotide | FVIIIrp/sFVIII | SEQ | |
| Position within | Change | amino acid | ID | |
| FVIIIrp | (wt/sFVIII) | difference | NO: | TIP Set |
| 2016 | GTG/GCG | Val/Ala | 1274 | VYSNKCQTPLGMASGHIRDFQ |
| | | | 1275 | LVYSNKCQTPLGMASGHIRDF |
| | | | 1276 | FLVYSNKCQTPLGMASGHIRD |
| | | | 1277 | LFLVYSNKCQTPLGMASGHIR |
| | | | 1278 | TLFLVYSNKCQTPLGMASGHI |
| | | | 1279 | STLFLVYSNKCQTPLGMASGH |
| | | | 1280 | MSTLFLVYSNKCQTPLGMASG |
| | | | 1281 | GMSTLFLVYSNKCQTPLGMAS |
| | | | 1282 | AGMSTLFLVYSNKCQTPLGMA |
| | | | 1283 | HAGMSTLFLVYSNKCQTPLGM |
| | | | 1284 | LHAGMSTLFLVYSNKCQTPLG |
| | | | 1285 | HLHAGMSTLFLVYSNKCQTPL |
| | | | 1286 | EHLHAGMSTLFLVYSNKCQTP |
| | | | 1287 | GEHLHAGMSTLFLVYSNKCQT |
| | | | 1288 | IGEHLHAGMSTLFLVYSNKCQ |
| | | | 1289 | LIGEHLHAGMSTLFLVYSNKC |
| | | | 1290 | CLIGEHLHAGMSTLFLVYSNK |
| | | | 1291 | ECLIGEHLHAGMSTLFLVYSN |
| | | | 1292 | VECLIGEHLHAGMSTLFLVYS |
| | | | 1293 | RVECLIGEHLHAGMSTLFLVY |
| | | | 1294 | WRVECLIGEHLHAGMSTLFLV |

TABLE 63

| | Missense | | | |
|---|---|---|---|---|
| Reference Locus | Nucleotide | FVIIIrp/sFVIII | SEQ | |
| Position within | Change | amino acid | ID | |
| FVIIIrp | (wt/sFVIII) | difference | NO: | TIP Set |
| 2039 | GCT/CCT | Ala/Pro | 1295 | ASGQYGQWAPKLARLHYSGSI |
| | | | 1296 | TASGQYGQWAPKLARLHYSGS |
| | | | 1297 | ITASGQYGQWAPKLARLHYSG |
| | | | 1298 | QITASGQYGQWAPKLARLHYS |
| | | | 1299 | FQITASGQYGQWAPKLARLHY |
| | | | 1300 | DFQITASGQYGQWAPKLARLH |
| | | | 1301 | RDFQITASGQYGQWAPKLARL |
| | | | 1302 | IRDFQITASGQYGQWAPKLAR |
| | | | 1303 | HIRDFQITASGQYGQWAPKLA |
| | | | 1304 | GHIRDFQITASGQYGQWAPKL |
| | | | 1305 | SGHIRDFQITASGQYGQWAPK |
| | | | 1306 | ASGHIRDFQITASGQYGQWAP |
| | | | 1307 | MASGHIRDFQITASGQYGQWA |
| | | | 1308 | GMASGHIRDFQITASGQYGQW |
| | | | 1309 | LGMASGHIRDFQITASGQYGQ |
| | | | 1310 | PLGMASGHIRDFQITASGQYG |
| | | | 1311 | TPLGMASGHIRDFQITASGQY |
| | | | 1312 | QTPLGMASGHIRDFQITASGQ |
| | | | 1313 | CQTPLGMASGHIRDFQITASG |
| | | | 1314 | KCQTPLGMASGHIRDFQITAS |
| | | | 1315 | NKCQTPLGMASGHIRDFQITA |

TABLE 64

| | Missense | | | |
|---|---|---|---|---|
| Reference Locus | Nucleotide | FVIIIrp/sFVIII | SEQ | |
| Position within | Change | amino acid | ID | |
| FVIIIrp | (wt/sFVIII) | difference | NO: | TIP Set |
| 2062 | TGG/TGC | Trp/Cys | 1316 | WSTKEPFSWIKVDLLAPMIIH |
| | | | 1317 | AWSTKEPFSWIKVDLLAPMII |
| | | | 1318 | NAWSTKEPFSWIKVDLLAPMI |
| | | | 1319 | INAWSTKEPFSWIKVDLLAPM |
| | | | 1320 | SINAWSTKEPFSWIKVDLLAP |
| | | | 1321 | GSINAWSTKEPFSWIKVDLLA |
| | | | 1322 | SGSINAWSTKEPFSWIKVDLL |
| | | | 1323 | YSGSINAWSTKEPFSWIKVDL |
| | | | 1324 | HYSGSINAWSTKEPFSWIKVD |
| | | | 1325 | LHYSGSINAWSTKEPFSWIKV |
| | | | 1326 | RLHYSGSINAWSTKEPFSWIK |
| | | | 1327 | ARLHYSGSINAWSTKEPFSWI |
| | | | 1328 | LARLHYSGSINAWSTKEPFSW |
| | | | 1329 | KLARLHYSGSINAWSTKEPFS |
| | | | 1330 | PKLARLHYSGSINAWSTKEPF |
| | | | 1331 | APKLARLHYSGSINAWSTKEP |
| | | | 1332 | WAPKLARLHYSGSINAWSTKE |
| | | | 1333 | QWAPKLARLHYSGSINAWSTK |
| | | | 1334 | GQWAPKLARLHYSGSINAWST |
| | | | 1335 | YGQWAPKLARLHYSGSINAWS |
| | | | 1336 | QYGQWAPKLARLHYSGSINAW |

TABLE 65

| | Missense | | | |
|---|---|---|---|---|
| Reference Locus | Nucleotide | FVIIIrp/sFVIII | SEQ | |
| Position within | Change | amino acid | ID | |
| FVIIIrp | (wt/sFVIII) | difference | NO: | TIP Set |
| 2074 | GAT/GGT | Asp/Gly | 1337 | DLLAPMIIHGIKTQGARQKFS |
| | | | 1338 | VDLLAPMIIHGIKTQGARQKF |
| | | | 1339 | KVDLLAPMIIHGIKTQGARQK |
| | | | 1340 | IKVDLLAPMIIHGIKTQGARQ |
| | | | 1341 | WIKVDLLAPMIIHGIKTQGAR |
| | | | 1342 | SWIKVDLLAPMIIHGIKTQGA |
| | | | 1343 | FSWIKVDLLAPMIIHGIKTQG |
| | | | 1344 | PFSWIKVDLLAPMIIHGIKTQ |
| | | | 1345 | EPFSWIKVDLLAPMIIHGIKT |
| | | | 1346 | KEPFSWIKVDLLAPMIIHGIK |
| | | | 1347 | TKEPFSWIKVDLLAPMIIHGI |
| | | | 1348 | STKEPFSWIKVDLLAPMIIHG |
| | | | 1349 | WSTKEPFSWIKVDLLAPMIIH |
| | | | 1350 | AWSTKEPFSWIKVDLLAPMII |
| | | | 1351 | NAWSTKEPFSWIKVDLLAPMI |
| | | | 1352 | INAWSTKEPFSWIKVDLLAPM |
| | | | 1353 | SINAWSTKEPFSWIKVDLLAP |
| | | | 1354 | GSINAWSTKEPFSWIKVDLLA |
| | | | 1355 | SGSINAWSTKEPFSWIKVDLL |
| | | | 1356 | YSGSINAWSTKEPFSWIKVDL |
| | | | 1357 | HYSGSINAWSTKEPFSWIKVD |

TABLE 66

| | Missense | | | |
|---|---|---|---|---|
| Reference Locus | Nucleotide | FVIIIrp/sFVIII | SEQ | |
| Position within | Change | amino acid | ID | |
| FVIIIrp | (wt/sFVIII) | difference | NO: | TIP Set |
| 2083 | GGC/GAC | Gly/Asp | 1358 | GIKTQGARQKFSSLYISQFII |
| | | | 1359 | HGIKTQGARQKFSSLYISQFI |
| | | | 1360 | IHGIKTQGARQKFSSLYISQF |
| | | | 1361 | IIHGIKTQGARQKFSSLYISQ |
| | | | 1362 | MIIHGIKTQGARQKFSSLYIS |
| | | | 1363 | PMIIHGIKTQGARQKFSSLYI |
| | | | 1364 | APMIIHGIKTQGARQKFSSLY |
| | | | 1365 | LAPMIIHGIKTQGARQKFSSL |
| | | | 1366 | LLAPMIIHGIKTQGARQKFSS |
| | | | 1367 | DLLAPMIIHGIKTQGARQKFS |
| | | | 1368 | VDLLAPMIIHGIKTQGARQKF |
| | | | 1369 | KVDLLAPMIIHGIKTQGARQK |
| | | | 1370 | IKVDLLAPMIIHGIKTQGARQ |
| | | | 1371 | WIKVDLLAPMIIHGIKTQGAR |
| | | | 1372 | SWIKVDLLAPMIIHGIKTQGA |
| | | | 1373 | FSWIKVDLLAPMIIHGIKTQG |
| | | | 1374 | PFSWIKVDLLAPMIIHGIKTQ |
| | | | 1375 | EPFSWIKVDLLAPMIIHGIKT |
| | | | 1376 | KEPFSWIKVDLLAPMIIHGIK |
| | | | 1377 | TKEPFSWIKVDLLAPMIIHGI |
| | | | 1378 | STKEPFSWIKVDLLAPMIIHG |

TABLE 67

| | Missense | | | |
|---|---|---|---|---|
| Reference Locus | Nucleotide | FVIIIrp/sFVIII | SEQ | |
| Position within | Change | amino acid | ID | |
| FVIIIrp | (wt/sFVIII) | difference | NO: | TIP Set |
| 2086 | ACC/AAC | Thr/Asn | 1379 | TQGARQKFSSLYISQFIIMYS |
| | | | 1380 | KTQGARQKFSSLYISQFIIMY |
| | | | 1381 | IKTQGARQKFSSLYISQFIIM |
| | | | 1382 | GIKTQGARQKFSSLYISQFII |
| | | | 1383 | HGIKTQGARQKFSSLYISQFI |
| | | | 1384 | IHGIKTQGARQKFSSLYISQF |
| | | | 1385 | IIHGIKTQGARQKFSSLYISQ |
| | | | 1386 | MIIHGIKTQGARQKFSSLYIS |
| | | | 1387 | PMIIHGIKTQGARQKFSSLYI |
| | | | 1388 | APMIIHGIKTQGARQKFSSLY |
| | | | 1389 | LAPMIIHGIKTQGARQKFSSL |
| | | | 1390 | LLAPMIIHGIKTQGARQKFSS |
| | | | 1391 | DLLAPMIIHGIKTQGARQKFS |
| | | | 1392 | VDLLAPMIIHGIKTQGARQKF |
| | | | 1393 | KVDLLAPMIIHGIKTQGARQK |
| | | | 1394 | IKVDLLAPMIIHGIKTQGARQ |
| | | | 1395 | WIKVDLLAPMIIHGIKTQGAR |
| | | | 1396 | SWIKVDLLAPMIIHGIKTQGA |
| | | | 1397 | FSWIKVDLLAPMIIHGIKTQG |
| | | | 1398 | PFSWIKVDLLAPMIIHGIKTQ |
| | | | 1399 | EPFSWIKVDLLAPMIIHGIKT |

TABLE 68

| | Missense | | | |
|---|---|---|---|---|
| Reference Locus | Nucleotide | FVIIIrp/sFVIII | SEQ | |
| Position within | Change | amino acid | ID | |
| FVIIIrp | (wt/sFVIII) | difference | NO: | TIP Set |
| 2105 | TAT/TGT | Tyr/Cys | 1400 | YSLDGKKWQTYRGNSTGTLMV |
| | | | 1401 | MYSLDGKKWQTYRGNSTGTLM |
| | | | 1402 | IMYSLDGKKWQTYRGNSTGTL |
| | | | 1403 | IIMYSLDGKKWQTYRGNSTGT |
| | | | 1404 | FIIMYSLDGKKWQTYRGNSTG |
| | | | 1405 | QFIIMYSLDGKKWQTYRGNST |
| | | | 1406 | SQFIIMYSLDGKKWQTYRGNS |
| | | | 1407 | ISQFIIMYSLDGKKWQTYRGN |
| | | | 1408 | YISQFIIMYSLDGKKWQTYRG |
| | | | 1409 | LYISQFIIMYSLDGKKWQTYR |
| | | | 1410 | SLYISQFIIMYSLDGKKWQTY |
| | | | 1411 | SSLYISQFIIMYSLDGKKWQT |
| | | | 1412 | FSSLYISQFIIMYSLDGKKWQ |
| | | | 1413 | KFSSLYISQFIIMYSLDGKKW |
| | | | 1414 | QKFSSLYISQFIIMYSLDGKK |
| | | | 1415 | RQKFSSLYISQFIIMYSLDGK |
| | | | 1416 | ARQKFSSLYISQFIIMYSLDG |
| | | | 1417 | GARQKFSSLYISQFIIMYSLD |
| | | | 1418 | QGARQKFSSLYISQFIIMYSL |
| | | | 1419 | TQGARQKFSSLYISQFIIMYS |
| | | | 1420 | KTQGARQKFSSLYISQFIIMY |

TABLE 69

| | Missense | | | |
|---|---|---|---|---|
| Reference Locus | Nucleotide | FVIIIrp/sFVIII | SEQ | |
| Position within | Change | amino acid | ID | |
| FVIIIrp | (wt/sFVIII) | difference | NO: | TIP Set |
| 2129 | AAT/AGT | Asn/Ser | 1421 | NVDSSGIKHNIFNPPIIARYI |
| | | | 1422 | GNVDSSGIKHNIFNPPIIARY |
| | | | 1423 | FGNVDSSGIKHNIFNPPIIAR |
| | | | 1424 | FFGNVDSSGIKHNIFNPPIIA |
| | | | 1425 | VFFGNVDSSGIKHNIFNPPII |
| | | | 1426 | MVFFGNVDSSGIKHNIFNPPI |
| | | | 1427 | LMVFFGNVDSSGIKHNIFNPP |
| | | | 1428 | TLMVFFGNVDSSGIKHNIFNP |
| | | | 1429 | GTLMVFFGNVDSSGIKHNIFN |
| | | | 1430 | TGTLMVFFGNVDSSGIKHNIF |
| | | | 1431 | STGTLMVFFGNVDSSGIKHNI |
| | | | 1432 | NSTGTLMVFFGNVDSSGIKHN |
| | | | 1433 | GNSTGTLMVFFGNVDSSGIKH |
| | | | 1434 | RGNSTGTLMVFFGNVDSSGIK |
| | | | 1435 | YRGNSTGTLMVFFGNVDSSGI |
| | | | 1436 | TYRGNSTGTLMVFFGNVDSSG |
| | | | 1437 | QTYRGNSTGTLMVFFGNVDSS |
| | | | 1438 | WQTYRGNSTGTLMVFFGNVDS |
| | | | 1439 | KWQTYRGNSTGTLMVFFGNVD |
| | | | 1440 | KKWQTYRGNSTGTLMVFFGNV |
| | | | 1441 | GKKWQTYRGNSTGTLMVFFGN |

TABLE 70

| | Missense | | | |
|---|---|---|---|---|
| Reference Locus | Nucleotide | FVIIIrp/sFVIII | SEQ | |
| Position within | Change | amino acid | ID | |
| FVIIIrp | (wt/sFVIII) | difference | NO: | TIP Set |
| 2150 | CGT/CAT | Arg/His | 1442 | RLHPTHYSIRSTLRMELMGCD |
| | | | 1443 | IRLHPTHYSIRSTLRMELMGC |
| | | | 1444 | YIRLHPTHYSIRSTLRMELMG |
| | | | 1445 | RYIRLHPTHYSIRSTLRMELM |
| | | | 1446 | ARYIRLHPTHYSIRSTLRMEL |
| | | | 1447 | IARYIRLHPTHYSIRSTLRME |
| | | | 1448 | IIARYIRLHPTHYSIRSTLRM |
| | | | 1449 | PIIARYIRLHPTHYSIRSTLR |
| | | | 1450 | PPIIARYIRLHPTHYSIRSTL |
| | | | 1451 | NPPIIARYIRLHPTHYSIRST |
| | | | 1452 | FNPPIIARYIRLHPTHYSIRS |
| | | | 1453 | IFNPPIIARYIRLHPTHYSIR |
| | | | 1454 | NIFNPPIIARYIRLHPTHYSI |
| | | | 1455 | HNIFNPPIIARYIRLHPTHYS |
| | | | 1456 | KHNIFNPPIIARYIRLHPTHY |
| | | | 1457 | IKHNIFNPPIIARYIRLHPTH |
| | | | 1458 | GIKHNIFNPPIIARYIRLHPT |
| | | | 1459 | SGIKHNIFNPPIIARYIRLHP |
| | | | 1460 | SSGIKHNIFNPPIIARYIRLH |
| | | | 1461 | DSSGIKHNIFNPPIIARYIRL |
| | | | 1462 | VDSSGIKHNIFNPPIIARYIR |

TABLE 71

| | Missense | | | |
|---|---|---|---|---|
| Reference Locus | Nucleotide | FVIIIrp/sFVIII | SEQ | |
| Position within | Change | amino acid | ID | |
| FVIIIrp | (wt/sFVIII) | difference | NO: | TIP Set |
| 2159 | CGC/TGC | Arg/Cys | 1463 | RSTLRMELMGCDLNSCSMPLG |
| | | | 1464 | IRSTLRMELMGCDLNSCSMPL |
| | | | 1465 | SIRSTLRMELMGCDLNSCSMP |
| | | | 1466 | YSIRSTLRMELMGCDLNSCSM |
| | | | 1467 | HYSIRSTLRMELMGCDLNSCS |
| | | | 1468 | THYSIRSTLRMELMGCDLNSC |
| | | | 1469 | PTHYSIRSTLRMELMGCDLNS |
| | | | 1470 | HPTHYSIRSTLRMELMGCDLN |
| | | | 1471 | LHPTHYSIRSTLRMELMGCDL |
| | | | 1472 | RLHPTHYSIRSTLRMELMGCD |
| | | | 1473 | IRLHPTHYSIRSTLRMELMGC |
| | | | 1474 | YIRLHPTHYSIRSTLRMELMG |
| | | | 1475 | RYIRLHPTHYSIRSTLRMELM |
| | | | 1476 | ARYIRLHPTHYSIRSTLRMEL |
| | | | 1477 | IARYIRLHPTHYSIRSTLRME |
| | | | 1478 | IIARYIRLHPTHYSIRSTLRM |
| | | | 1479 | PIIARYIRLHPTHYSIRSTLR |
| | | | 1480 | PPIIARYIRLHPTHYSIRSTL |
| | | | 1481 | NPPIIARYIRLHPTHYSIRST |
| | | | 1482 | FNPPIIARYIRLHPTHYSIRS |
| | | | 1483 | IFNPPIIARYIRLHPTHYSIR |

TABLE 72

| | Missense | | | |
|---|---|---|---|---|
| Reference Locus | Nucleotide | FVIIIrp/sFVIII | SEQ | |
| Position within | Change | amino acid | ID | |
| FVIIIrp | (wt/sFVIII) | difference | NO: | TIP Set |
| 2163 | CGC/CAC | Arg/His | 1484 | RMELMGCDLNSCSMPLGMESK |
| | | | 1485 | LRMELMGCDLNSCSMPLGMES |
| | | | 1486 | TLRMELMGCDLNSCSMPLGME |
| | | | 1487 | STLRMELMGCDLNSCSMPLGM |
| | | | 1488 | RSTLRMELMGCDLNSCSMPLG |
| | | | 1489 | IRSTLRMELMGCDLNSCSMPL |
| | | | 1490 | SIRSTLRMELMGCDLNSCSMP |
| | | | 1491 | YSIRSTLRMELMGCDLNSCSM |
| | | | 1492 | HYSIRSTLRMELMGCDLNSCS |
| | | | 1493 | THYSIRSTLRMELMGCDLNSC |
| | | | 1494 | PTHYSIRSTLRMELMGCDLNS |
| | | | 1495 | HPTHYSIRSTLRMELMGCDLN |
| | | | 1496 | LHPTHYSIRSTLRMELMGCDL |
| | | | 1497 | RLHPTHYSIRSTLRMELMGCD |
| | | | 1498 | IRLHPTHYSIRSTLRMELMGC |
| | | | 1499 | YIRLHPTHYSIRSTLRMELMG |
| | | | 1500 | RYIRLHPTHYSIRSTLRMELM |
| | | | 1501 | ARYIRLHPTHYSIRSTLRMEL |
| | | | 1502 | IARYIRLHPTHYSIRSTLRME |
| | | | 1503 | IIARYIRLHPTHYSIRSTLRM |
| | | | 1504 | PIIARYIRLHPTHYSIRSTLR |

TABLE 73

| | Missense | | | |
|---|---|---|---|---|
| Reference Locus | Nucleotide | FVIIIrp/sFVIII | SEQ | |
| Position within | Change | amino acid | ID | |
| FVIIIrp | (wt/sFVIII) | difference | NO: | TIP Set |
| 2181 | GAG/GAT | Glu/Asp | 1505 | ESKAISDAQITASSYFTNMFA |
| | | | 1506 | MESKAISDAQITASSYFTNMF |
| | | | 1507 | GMESKAISDAQITASSYFTNM |
| | | | 1508 | LGMESKAISDAQITASSYFTN |
| | | | 1509 | PLGMESKAISDAQITASSYFT |
| | | | 1510 | MPLGMESKAISDAQITASSYF |
| | | | 1511 | SMPLGMESKAISDAQITASSY |
| | | | 1512 | CSMPLGMESKAISDAQITASS |
| | | | 1513 | SCSMPLGMESKAISDAQITAS |
| | | | 1514 | NSCSMPLGMESKAISDAQITA |
| | | | 1515 | LNSCSMPLGMESKAISDAQIT |
| | | | 1516 | DLNSCSMPLGMESKAISDAQI |
| | | | 1517 | CDLNSCSMPLGMESKAISDAQ |
| | | | 1518 | GCDLNSCSMPLGMESKAISDA |
| | | | 1519 | MGCDLNSCSMPLGMESKAISD |
| | | | 1520 | LMGCDLNSCSMPLGMESKAIS |
| | | | 1521 | ELMGCDLNSCSMPLGMESKAI |
| | | | 1522 | MELMGCDLNSCSMPLGMESKA |
| | | | 1523 | RMELMGCDLNSCSMPLGMESK |
| | | | 1524 | LRMELMGCDLNSCSMPLGMES |
| | | | 1525 | TLRMELMGCDLNSCSMPLGME |

TABLE 74

| | Missense | | | |
|---|---|---|---|---|
| Reference Locus | Nucleotide | FVIIIrp/sFVIII | SEQ | |
| Position within | Change | amino acid | ID | |
| FVIIIrp | (wt/sFVIII) | difference | NO: | TIP Set |
| 2201 | GCC/CCC | Ala/Pro | 1526 | ATWSPSKARLHLQGRSNAWRP |
| | | | 1527 | FATWSPSKARLHLQGRSNAWR |
| | | | 1528 | MFATWSPSKARLHLQGRSNAW |
| | | | 1529 | NMFATWSPSKARLHLQGRSNA |
| | | | 1530 | TNMFATWSPSKARLHLQGRSN |
| | | | 1531 | FTNMFATWSPSKARLHLQGRS |
| | | | 1532 | YFTNMFATWSPSKARLHLQGR |
| | | | 1533 | SYFTNMFATWSPSKARLHLQG |
| | | | 1534 | SSYFTNMFATWSPSKARLHLQ |
| | | | 1535 | ASSYFTNMFATWSPSKARLHL |
| | | | 1536 | TASSYFTNMFATWSPSKARLH |
| | | | 1537 | ITASSYFTNMFATWSPSKARL |
| | | | 1538 | QITASSYFTNMFATWSPSKAR |
| | | | 1539 | AQITASSYFTNMFATWSPSKA |
| | | | 1540 | DAQITASSYFTNMFATWSPSK |
| | | | 1541 | SDAQITASSYFTNMFATWSPS |
| | | | 1542 | ISDAQITASSYFTNMFATWSP |
| | | | 1543 | AISDAQITASSYFTNMFATWS |
| | | | 1544 | KAISDAQITASSYFTNMFATW |
| | | | 1545 | SKAISDAQITASSYFTNMFAT |
| | | | 1546 | ESKAISDAQITASSYFTNMFA |

TABLE 75

| | Missense | | | |
|---|---|---|---|---|
| Reference Locus | Nucleotide | FVIIIrp/sFVIII | SEQ | |
| Position within | Change | amino acid | ID | |
| FVIIIrp | (wt/sFVIII) | difference | NO: | TIP Set |
| 2209 | CGA/CAA | Arg/Gln | 1547 | RLHLQGRSNAWRPQVNNPKEW |
| | | | 1548 | ARLHLQGRSNAWRPQVNNPKE |
| | | | 1549 | KARLHLQGRSNAWRPQVNNPK |
| | | | 1550 | SKARLHLQGRSNAWRPQVNNP |
| | | | 1551 | PSKARLHLQGRSNAWRPQVNN |
| | | | 1552 | SPSKARLHLQGRSNAWRPQVN |
| | | | 1553 | WSPSKARLHLQGRSNAWRPQV |
| | | | 1554 | TWSPSKARLHLQGRSNAWRPQ |
| | | | 1555 | ATWSPSKARLHLQGRSNAWRP |
| | | | 1556 | FATWSPSKARLHLQGRSNAWR |
| | | | 1557 | MFATWSPSKARLHLQGRSNAW |
| | | | 1558 | NMFATWSPSKARLHLQGRSNA |
| | | | 1559 | TNMFATWSPSKARLHLQGRSN |
| | | | 1560 | FTNMFATWSPSKARLHLQGRS |
| | | | 1561 | YFTNMFATWSPSKARLHLQGR |
| | | | 1562 | SYFTNMFATWSPSKARLHLQG |
| | | | 1563 | SSYFTNMFATWSPSKARLHLQ |
| | | | 1564 | ASSYFTNMFATWSPSKARLHL |
| | | | 1565 | TASSYFTNMFATWSPSKARLH |
| | | | 1566 | ITASSYFTNMFATWSPSKARL |
| | | | 1567 | QITASSYFTNMFATWSPSKAR |

TABLE 76

| | Missense | | | |
|---|---|---|---|---|
| Reference Locus | Nucleotide | FVIIIrp/sFVIII | SEQ | |
| Position within | Change | amino acid | ID | |
| FVIIIrp | (wt/sFVIII) | difference | NO: | TIP Set |
| 2218 | GCC/ACC | Ala/Thr | 1568 | AWRPQVNNPKEWLQVDFQKTM |
| | | | 1569 | NAWRPQVNNPKEWLQVDFQKT |
| | | | 1570 | SNAWRPQVNNPKEWLQVDFQK |
| | | | 1571 | RSNAWRPQVNNPKEWLQVDFQ |
| | | | 1572 | GRSNAWRPQVNNPKEWLQVDF |
| | | | 1573 | QGRSNAWRPQVNNPKEWLQVD |
| | | | 1574 | LQGRSNAWRPQVNNPKEWLQV |
| | | | 1575 | HLQGRSNAWRPQVNNPKEWLQ |
| | | | 1576 | LHLQGRSNAWRPQVNNPKEWL |
| | | | 1577 | RLHLQGRSNAWRPQVNNPKEW |
| | | | 1578 | ARLHLQGRSNAWRPQVNNPKE |
| | | | 1579 | KARLHLQGRSNAWRPQVNNPK |
| | | | 1580 | SKARLHLQGRSNAWRPQVNNP |
| | | | 1581 | PSKARLHLQGRSNAWRPQVNN |
| | | | 1582 | SPSKARLHLQGRSNAWRPQVN |
| | | | 1583 | WSPSKARLHLQGRSNAWRPQV |
| | | | 1584 | TWSPSKARLHLQGRSNAWRPQ |
| | | | 1585 | ATWSPSKARLHLQGRSNAWRP |
| | | | 1586 | FATWSPSKARLHLQGRSNAWR |
| | | | 1587 | MFATWSPSKARLHLQGRSNAW |
| | | | 1588 | NMFATWSPSKARLHLQGRSNA |

TABLE 77

| | Missense | | | |
|---|---|---|---|---|
| Reference Locus | Nucleotide | FVIIIrp/sFVIII | SEQ | |
| Position within | Change | amino acid | ID | |
| FVIIIrp | (wt/sFVIII) | difference | NO: | TIP Set |
| 2228 | GAG/GAC | Glu/Asp | 1589 | EWLQVDFQKTMKVTGVTTQGV |
| | | | 1590 | KEWLQVDFQKTMKVTGVTTQG |
| | | | 1591 | PKEWLQVDFQKTMKVTGVTTQ |
| | | | 1592 | NPKEWLQVDFQKTMKVTGVTT |
| | | | 1593 | NNPKEWLQVDFQKTMKVTGVT |
| | | | 1594 | VNNPKEWLQVDFQKTMKVTGV |
| | | | 1595 | QVNNPKEWLQVDFQKTMKVTG |
| | | | 1596 | PQVNNPKEWLQVDFQKTMKVT |
| | | | 1597 | RPQVNNPKEWLQVDFQKTMKV |
| | | | 1598 | WRPQVNNPKEWLQVDFQKTMK |
| | | | 1599 | AWRPQVNNPKEWLQVDFQKTM |
| | | | 1600 | NAWRPQVNNPKEWLQVDFQKT |
| | | | 1601 | SNAWRPQVNNPKEWLQVDFQK |
| | | | 1602 | RSNAWRPQVNNPKEWLQVDFQ |
| | | | 1603 | GRSNAWRPQVNNPKEWLQVDF |
| | | | 1604 | QGRSNAWRPQVNNPKEWLQVD |
| | | | 1605 | LQGRSNAWRPQVNNPKEWLQV |
| | | | 1606 | HLQGRSNAWRPQVNNPKEWLQ |
| | | | 1607 | LHLQGRSNAWRPQVNNPKEWL |
| | | | 1608 | RLHLQGRSNAWRPQVNNPKEW |
| | | | 1609 | ARLHLQGRSNAWRPQVNNPKE |

TABLE 78

| | Missense | | | |
|---|---|---|---|---|
| Reference Locus | Nucleotide | FVIIIrp/sFVIII | SEQ | |
| Position within | Change | amino acid | ID | |
| FVIIIrp | (wt/sFVIII) | difference | NO: | TIP Set |
| 2229 | TGG/TGT | Trp/Cys | 1610 | WLQVDFQKTMKVTGVTTQGVK |
| | | | 1611 | EWLQVDFQKTMKVTGVTTQGV |
| | | | 1612 | KEWLQVDFQKTMKVTGVTTQG |
| | | | 1613 | PKEWLQVDFQKTMKVTGVTTQ |
| | | | 1614 | NPKEWLQVDFQKTMKVTGVTT |
| | | | 1615 | NNPKEWLQVDFQKTMKVTGVT |
| | | | 1616 | VNNPKEWLQVDFQKTMKVTGV |
| | | | 1617 | QVNNPKEWLQVDFQKTMKVTG |
| | | | 1618 | PQVNNPKEWLQVDFQKTMKVT |
| | | | 1619 | RPQVNNPKEWLQVDFQKTMKV |
| | | | 1620 | WRPQVNNPKEWLQVDFQKTMK |
| | | | 1621 | AWRPQVNNPKEWLQVDFQKTM |
| | | | 1622 | NAWRPQVNNPKEWLQVDFQKT |
| | | | 1623 | SNAWRPQVNNPKEWLQVDFQK |
| | | | 1624 | RSNAWRPQVNNPKEWLQVDFQ |
| | | | 1625 | GRSNAWRPQVNNPKEWLQVDF |
| | | | 1626 | QGRSNAWRPQVNNPKEWLQVD |
| | | | 1627 | LQGRSNAWRPQVNNPKEWLQV |
| | | | 1628 | HLQGRSNAWRPQVNNPKEWLQ |
| | | | 1629 | LHLQGRSNAWRPQVNNPKEWL |
| | | | 1630 | RLHLQGRSNAWRPQVNNPKEW |

TABLE 79

| | Missense | | | |
|---|---|---|---|---|
| Reference Locus | Nucleotide | FVIIIrp/sFVIII | SEQ | |
| Position within | Change | amino acid | ID | |
| FVIIIrp | (wt/sFVIII) | difference | NO: | TIP Set |
| 2230 | CTG/CGG | Leu/Arg | 1631 | LQVDFQKTMKVTGVTTQGVKS |
| | | | 1632 | WLQVDFQKTMKVTGVTTQGVK |
| | | | 1633 | EWLQVDFQKTMKVTGVTTQGV |
| | | | 1634 | KEWLQVDFQKTMKVTGVTTQG |
| | | | 1635 | PKEWLQVDFQKTMKVTGVTTQ |
| | | | 1636 | NPKEWLQVDFQKTMKVTGVTT |
| | | | 1637 | NNPKEWLQVDFQKTMKVTGVT |
| | | | 1638 | VNNPKEWLQVDFQKTMKVTGV |
| | | | 1639 | QVNNPKEWLQVDFQKTMKVTG |
| | | | 1640 | PQVNNPKEWLQVDFQKTMKVT |
| | | | 1641 | RPQVNNPKEWLQVDFQKTMKV |
| | | | 1642 | WRPQVNNPKEWLQVDFQKTMK |
| | | | 1643 | AWRPQVNNPKEWLQVDFQKTM |
| | | | 1644 | NAWRPQVNNPKEWLQVDFQKT |
| | | | 1645 | SNAWRPQVNNPKEWLQVDFQK |
| | | | 1646 | RSNAWRPQVNNPKEWLQVDFQ |
| | | | 1647 | GRSNAWRPQVNNPKEWLQVDF |
| | | | 1648 | QGRSNAWRPQVNNPKEWLQVD |
| | | | 1649 | LQGRSNAWRPQVNNPKEWLQV |
| | | | 1650 | HLQGRSNAWRPQVNNPKEWLQ |
| | | | 1651 | LHLQGRSNAWRPQVNNPKEWL |

TABLE 80

| | Missense | | | |
|---|---|---|---|---|
| Reference Locus | Nucleotide | FVIIIrp/sFVIII | SEQ | |
| Position within | Change | amino acid | ID | |
| FVIIIrp | (wt/sFVIII) | difference | NO: | TIP Set |
| 2232 | GTG/GCG | Val/Ala | 1652 | VDFQKTMKVTGVTTQGVKSLL |
| | | | 1653 | QVDFQKTMKVTGVTTQGVKSL |
| | | | 1654 | LQVDFQKTMKVTGVTTQGVKS |
| | | | 1655 | WLQVDFQKTMKVTGVTTQGVK |
| | | | 1656 | EWLQVDFQKTMKVTGVTTQGV |
| | | | 1657 | KEWLQVDFQKTMKVTGVTTQG |
| | | | 1658 | PKEWLQVDFQKTMKVTGVTTQ |
| | | | 1659 | NPKEWLQVDFQKTMKVTGVTT |
| | | | 1660 | NNPKEWLQVDFQKTMKVTGVT |
| | | | 1661 | VNNPKEWLQVDFQKTMKVTGV |
| | | | 1662 | QVNNPKEWLQVDFQKTMKVTG |
| | | | 1663 | PQVNNPKEWLQVDFQKTMKVT |
| | | | 1664 | RPQVNNPKEWLQVDFQKTMKV |
| | | | 1665 | WRPQVNNPKEWLQVDFQKTMK |
| | | | 1666 | AWRPQVNNPKEWLQVDFQKTM |
| | | | 1667 | NAWRPQVNNPKEWLQVDFQKT |
| | | | 1668 | SNAWRPQVNNPKEWLQVDFQK |
| | | | 1669 | RSNAWRPQVNNPKEWLQVDFQ |
| | | | 1670 | GRSNAWRPQVNNPKEWLQVDF |
| | | | 1671 | QGRSNAWRPQVNNPKEWLQVD |
| | | | 1672 | LQGRSNAWRPQVNNPKEWLQV |

TABLE 81

| | Missense | | | |
|---|---|---|---|---|
| Reference Locus | Nucleotide | FVIIIrp/sFVIII | SEQ | |
| Position within | Change | amino acid | ID | |
| FVIIIrp | (wt/sFVIII) | difference | NO: | TIP Set |
| 2246 | CAG/AAG | Gln/Lys | 1673 | QGVKSLLTSMYVKEFLISSSQ |
| | | | 1674 | TQGVKSLLTSMYVKEFLISSS |
| | | | 1675 | TTQGVKSLLTSMYVKEFLISS |
| | | | 1676 | VTTQGVKSLLTSMYVKEFLIS |
| | | | 1677 | GVTTQGVKSLLTSMYVKEFLI |
| | | | 1678 | TGVTTQGVKSLLTSMYVKEFL |
| | | | 1679 | VTGVTTQGVKSLLTSMYVKEF |
| | | | 1680 | KVTGVTTQGVKSLLTSMYVKE |
| | | | 1681 | MKVTGVTTQGVKSLLTSMYVK |
| | | | 1682 | TMKVTGVTTQGVKSLLTSMYV |
| | | | 1683 | KTMKVTGVTTQGVKSLLTSMY |
| | | | 1684 | QKTMKVTGVTTQGVKSLLTSM |
| | | | 1685 | FQKTMKVTGVTTQGVKSLLTS |
| | | | 1686 | DFQKTMKVTGVTTQGVKSLLT |
| | | | 1687 | VDFQKTMKVTGVTTQGVKSLL |
| | | | 1688 | QVDFQKTMKVTGVTTQGVKSL |
| | | | 1689 | LQVDFQKTMKVTGVTTQGVKS |
| | | | 1690 | WLQVDFQKTMKVTGVTTQGVK |
| | | | 1691 | EWLQVDFQKTMKVTGVTTQGV |
| | | | 1692 | KEWLQVDFQKTMKVTGVTTQG |
| | | | 1693 | PKEWLQVDFQKTMKVTGVTTQ |

TABLE 82

| | Missense | | | |
|---|---|---|---|---|
| Reference Locus | Nucleotide | FVIIIrp/sFVIII | SEQ | |
| Position within | Change | amino acid | ID | |
| FVIIIrp | (wt/sFVIII) | difference | NO: | TIP Set |
| 2257 | GTG/GGG | Val/Gly | 1694 | VKEFLISSSQDGHQWTLFFQN |
| | | | 1695 | YVKEFLISSSQDGHQWTLFFQ |
| | | | 1696 | MYVKEFLISSSQDGHQWTLFF |
| | | | 1697 | SMYVKEFLISSSQDGHQWTLF |
| | | | 1698 | TSMYVKEFLISSSQDGHQWTL |
| | | | 1699 | LTSMYVKEFLISSSQDGHQWT |
| | | | 1700 | LLTSMYVKEFLISSSQDGHQW |
| | | | 1701 | SLLTSMYVKEFLISSSQDGHQ |
| | | | 1702 | KSLLTSMYVKEFLISSSQDGH |
| | | | 1703 | VKSLLTSMYVKEFLISSSQDG |
| | | | 1704 | GVKSLLTSMYVKEFLISSSQD |
| | | | 1705 | QGVKSLLTSMYVKEFLISSSQ |
| | | | 1706 | TQGVKSLLTSMYVKEFLISSS |
| | | | 1707 | TTQGVKSLLTSMYVKEFLISS |
| | | | 1708 | VTTQGVKSLLTSMYVKEFLIS |
| | | | 1709 | GVTTQGVKSLLTSMYVKEFLI |
| | | | 1710 | TGVTTQGVKSLLTSMYVKEFL |
| | | | 1711 | VTGVTTQGVKSLLTSMYVKEF |
| | | | 1712 | KVTGVTTQGVKSLLTSMYVKE |
| | | | 1713 | MKVTGVTTQGVKSLLTSMYVK |
| | | | 1714 | TMKVTGVTTQGVKSLLTSMYV |

TABLE 83

| | Missense | | | |
|---|---|---|---|---|
| Reference Locus | Nucleotide | FVIIIrp/sFVIII | SEQ | |
| Position within | Change | amino acid | ID | |
| FVIIIrp | (wt/sFVIII) | difference | NO: | TIP Set |
| 2260 | TTC/TGC | Phe/Cys | 1715 | FLISSSQDGHQWTLFFQNGKV |
| | | | 1716 | EFLISSSQDGHQWTLFFQNGK |
| | | | 1717 | KEFLISSSQDGHQWTLFFQNG |
| | | | 1718 | VKEFLISSSQDGHQWTLFFQN |
| | | | 1719 | YVKEFLISSSQDGHQWTLFFQ |
| | | | 1720 | MYVKEFLISSSQDGHQWTLFF |
| | | | 1721 | SMYVKEFLISSSQDGHQWTLF |
| | | | 1722 | TSMYVKEFLISSSQDGHQWTL |
| | | | 1723 | LTSMYVKEFLISSSQDGHQWT |
| | | | 1724 | LLTSMYVKEFLISSSQDGHQW |
| | | | 1725 | SLLTSMYVKEFLISSSQDGHQ |
| | TTC/ATC | Phe/Ile | 1726 | KSLLTSMYVKEFLISSSQDGH |
| | | | 1727 | VKSLLTSMYVKEFLISSSQDG |
| | | | 1728 | GVKSLLTSMYVKEFLISSSQD |
| | | | 1729 | QGVKSLLTSMYVKEFLISSSQ |
| | | | 1730 | TQGVKSLLTSMYVKEFLISSS |
| | | | 1731 | TTQGVKSLLTSMYVKEFLISS |
| | | | 1732 | VTTQGVKSLLTSMYVKEFLIS |
| | | | 1733 | GVTTQGVKSLLTSMYVKEFLI |
| | | | 1734 | TGVTTQGVKSLLTSMYVKEFL |
| | | | 1735 | VTGVTTQGVKSLLTSMYVKEF |

TABLE 84

| | Missense | | | |
|---|---|---|---|---|
| Reference Locus | Nucleotide | FVIIIrp/sFVIII | SEQ | |
| Position within | Change | amino acid | ID | |
| FVIIIrp | (wt/sFVIII) | difference | NO: | TIP Set |
| 2286 | AAT/AAG | Asn/Lys | 1736 | NQDSFTPVVNSLDPPLLTRYL |
| | | | 1737 | GNQDSFTPVVNSLDPPLLTRY |
| | | | 1738 | QGNQDSFTPVVNSLDPPLLTR |
| | | | 1739 | FQGNQDSFTPVVNSLDPPLLT |
| | | | 1740 | VFQGNQDSFTPVVNSLDPPLL |
| | | | 1741 | KVFQGNQDSFTPVVNSLDPPL |
| | | | 1742 | VKVFQGNQDSFTPVVNSLDPP |
| | | | 1743 | KVKVFQGNQDSFTPVVNSLDP |
| | | | 1744 | GKVKVFQGNQDSFTPVVNSLD |
| | | | 1745 | NGKVKVFQGNQDSFTPVVNSL |
| | | | 1746 | QNGKVKVFQGNQDSFTPVVNS |
| | | | 1747 | FQNGKVKVFQGNQDSFTPVVN |
| | | | 1748 | FFQNGKVKVFQGNQDSFTPVV |
| | | | 1749 | LFFQNGKVKVFQGNQDSFTPV |
| | | | 1750 | TLFFQNGKVKVFQGNQDSFTP |
| | | | 1751 | WTLFFQNGKVKVFQGNQDSFT |
| | | | 1752 | QWTLFFQNGKVKVFQGNQDSF |
| | | | 1753 | HQWTLFFQNGKVKVFQGNQDS |
| | | | 1754 | GHQWTLFFQNGKVKVFQGNQD |
| | | | 1755 | DGHQWTLFFQNGKVKVFQGNQ |
| | | | 1756 | QDGHQWTLFFQNGKVKVFQGN |

TABLE 85

| | Missense | | | |
|---|---|---|---|---|
| Reference Locus | Nucleotide | FVIIIrp/sFVIII | SEQ | |
| Position within | Change | amino acid | ID | |
| FVIIIrp | (wt/sFVIII) | difference | NO: | TIP Set |
| 2300 | CCG/CTG | Pro/Leu | 1757 | PLLTRYLRIHPQSWVHQIALR |
| | | | 1758 | PPLLTRYLRIHPQSWVHQIAL |
| | | | 1759 | DPPLLTRYLRIHPQSWVHQIA |
| | | | 1760 | LDPPLLTRYLRIHPQSWVHQI |
| | | | 1761 | SLDPPLLTRYLRIHPQSWVHQ |
| | | | 1762 | NSLDPPLLTRYLRIHPQSWVH |
| | | | 1763 | VNSLDPPLLTRYLRIHPQSWV |
| | | | 1764 | VVNSLDPPLLTRYLRIHPQSW |
| | | | 1765 | PVVNSLDPPLLTRYLRIHPQS |
| | | | 1766 | TPVVNSLDPPLLTRYLRIHPQ |
| | | | 1767 | FTPVVNSLDPPLLTRYLRIHP |
| | | | 1768 | SFTPVVNSLDPPLLTRYLRIH |
| | | | 1769 | DSFTPVVNSLDPPLLTRYLRI |
| | | | 1770 | QDSFTPVVNSLDPPLLTRYLR |
| | | | 1771 | NQDSFTPVVNSLDPPLLTRYL |
| | | | 1772 | GNQDSFTPVVNSLDPPLLTRY |
| | | | 1773 | QGNQDSFTPVVNSLDPPLLTR |
| | | | 1774 | FQGNQDSFTPVVNSLDPPLLT |
| | | | 1775 | VFQGNQDSFTPVVNSLDPPLL |
| | | | 1776 | KVFQGNQDSFTPVVNSLDPPL |
| | | | 1777 | VKVFQGNQDSFTPVVNSLDPP |

TABLE 86

| | Missense | | | |
|---|---|---|---|---|
| Reference Locus | Nucleotide | FVIIIrp/sFVIII | SEQ | |
| Position within | Change | amino acid | ID | |
| FVIIIrp | (wt/sFVIII) | difference | NO: | TIP Set |
| 2304 | CGC/TGC | Arg/Cys | 1778 | RYLRIHPQSWVHQIALRMEVL |
| | | | 1779 | TRYLRIHPQSWVHQIALRMEV |
| | | | 1780 | LTRYLRIHPQSWVHQIALRME |
| | | | 1781 | LLTRYLRIHPQSWVHQIALRM |
| | | | 1782 | PLLTRYLRIHPQSWVHQIALR |
| | | | 1783 | PPLLTRYLRIHPQSWVHQIAL |
| | | | 1784 | DPPLLTRYLRIHPQSWVHQIA |
| | | | 1785 | LDPPLLTRYLRIHPQSWVHQI |
| | | | 1786 | SLDPPLLTRYLRIHPQSWVHQ |
| | | | 1787 | NSLDPPLLTRYLRIHPQSWVH |
| | | | 1788 | VNSLDPPLLTRYLRIHPQSWV |
| | | | 1789 | VVNSLDPPLLTRYLRIHPQSW |
| | | | 1790 | PVVNSLDPPLLTRYLRIHPQS |
| | | | 1791 | TPVVNSLDPPLLTRYLRIHPQ |
| | | | 1792 | FTPVVNSLDPPLLTRYLRIHP |
| | | | 1793 | SFTPVVNSLDPPLLTRYLRIH |
| | | | 1794 | DSFTPVVNSLDPPLLTRYLRI |
| | | | 1795 | QDSFTPVVNSLDPPLLTRYLR |
| | | | 1796 | NQDSFTPVVNSLDPPLLTRYL |
| | | | 1797 | GNQDSFTPVVNSLDPPLLTRY |
| | | | 1798 | QGNQDSFTPVVNSLDPPLLTR |

TABLE 87

| | Missense | | | |
|---|---|---|---|---|
| Reference Locus | Nucleotide | FVIIIrp/sFVIII | SEQ | |
| Position within | Change | amino acid | ID | |
| FVIIIrp | (wt/sFVIII) | difference | NO: | TIP Set |
| 2307 | CGA/CAA | Arg/Gln | 1799 | RIHPQSWVHQIALRMEVLGCE |
| | | | 1800 | LRIHPQSWVHQIALRMEVLGC |
| | | | 1801 | YLRIHPQSWVHQIALRMEVLG |
| | | | 1802 | RYLRIHPQSWVHQIALRMEVL |
| | | | 1803 | TRYLRIHPQSWVHQIALRMEV |
| | | | 1804 | LTRYLRIHPQSWVHQIALRME |
| | | | 1805 | LLTRYLRIHPQSWVHQIALRM |
| | | | 1806 | PLLTRYLRIHPQSWVHQIALR |
| | | | 1807 | PPLLTRYLRIHPQSWVHQIAL |
| | | | 1808 | DPPLLTRYLRIHPQSWVHQIA |
| | | | 1809 | LDPPLLTRYLRIHPQSWVHQI |
| | | | 1810 | SLDPPLLTRYLRIHPQSWVHQ |
| | | | 1811 | NSLDPPLLTRYLRIHPQSWVH |
| | | | 1812 | VNSLDPPLLTRYLRIHPQSWV |
| | | | 1813 | VVNSLDPPLLTRYLRIHPQSW |
| | | | 1814 | PVVNSLDPPLLTRYLRIHPQS |
| | | | 1815 | TPVVNSLDPPLLTRYLRIHPQ |
| | | | 1816 | FTPVVNSLDPPLLTRYLRIHP |
| | | | 1817 | SFTPVVNSLDPPLLTRYLRIH |
| | | | 1818 | DSFTPVVNSLDPPLLTRYLRI |
| | | | 1819 | QDSFTPVVNSLDPPLLTRYLR |

[0102] In certain aspects of the present invention, compositions directed to specific TIPs and TIP sets described in Tables 88-101, and methods using the compositions thereof, are provided herein. In one embodiment, at least one or more TIPs comprising at least 9 amino acids, at least 10 amino acids, at least 11 amino acids, at least 12 amino acids, at least 13 amino acids, at least 14 amino acids, at least 15 amino acids, at least 16 amino acids, at least 17 amino acids, at least 18 amino acids, at least 19 amino acids, at least 20 amino acids, or at least 21 amino acids, including at least one reference locus based on a nsSNP, identified in Tables 88-101 are provided. In one embodiment, at least one TIP set comprising at least 9 peptides, at least 10 peptides, at least 11 peptides, at least 12 peptides, at least 13 peptides, at 14 peptides, 15 peptides, at least 16 peptides, at least 17 peptides, at least 18 peptides, at least 19 peptides, at least 20 peptides, or at least 21 peptides, wherein the first peptide of the set comprises a reference locus at its first amino acid position, the second peptide of the set comprises a reference locus at its second amino acid position, and each successive peptide in the set comprises a reference locus at an amino acid position frame-shifted one position downstream from the reference locus position of the preceding peptide, and wherein the last peptide of the set has a reference locus in its last amino acid position, wherein the TIP sets are generated from the TIPs identified in Tables 88-101 (reference locus underlined and bolded), are provided herein. Tables 88-101 are provided below.

TABLE 88

| | ns-SNP TIPs | | | |
|---|---|---|---|---|
| | Major allele | | Minor allele | |
| | SEQ | | SEQ | |
| | ID | | ID | |
| F8 ns-SNPs | NO: | E113 | NO: | D113 |
| E113D | 1820 | EYDDQTSQREKEDDKVFPGGS | 1841 | DYDDQTSQREKEDDKVFPGGS |
| | 1821 | AEYDDQTSQREKEDDKVFPGG | 1842 | ADYDDQTSQREKEDDKVFPGG |
| | 1822 | GAEYDDQTSQREKEDDKVFPG | 1843 | GADYDDQTSQREKEDDKVFPG |
| | 1823 | EGAEYDDQTSQREKEDDKVFP | 1844 | EGADYDDQTSQREKEDDKVFP |
| | 1824 | SEGAEYDDQTSQREKEDDKVF | 1845 | SEGADYDDQTSQREKEDDKVF |
| | 1825 | ASEGAEYDDQTSQREKEDDKV | 1846 | ASEGADYDDQTSQREKEDDKV |
| | 1826 | KASEGAEYDDQTSQREKEDDK | 1847 | KASEGADYDDQTSQREKEDDK |
| | 1827 | WKASEGAEYDDQTSQREKEDD | 1848 | WKASEGADYDDQTSQREKEDD |
| | 1828 | YWKASEGAEYDDQTSQREKED | 1849 | YWKASEGADYDDQTSQREKED |
| | 1829 | SYWKASEGAEYDDQTSQREKE | 1850 | SYWKASEGADYDDQTSQREKE |
| | 1830 | VSYWKASEGAEYDDQTSQREK | 1851 | VSYWKASEGADYDDQTSQREK |
| | 1831 | GVSYWKASEGAEYDDQTSQRE | 1852 | GVSYWKASEGADYDDQTSQRE |
| | 1832 | VGVSYWKASEGAEYDDQTSQR | 1853 | [sequence omitted] |
| | 1833 | AVGVSYWKASEGAEYDDQTSQ | 1854 | AVGVSYWKASEGADYDDQTSQ |
| | 1834 | HAVGVSYWKASEGAEYDDQTS | 1855 | HAVGVSYWKASEGADYDDQTS |
| | 1835 | LHAVGVSYWKASEGAEYDDQT | 1856 | LHAVGVSYWKASEGADYDDQT |
| | 1836 | SLHAVGVSYWKASEGAEYDDQ | 1857 | SLHAVGVSYWKASEGADYDDQ |
| | 1837 | VSLHAVGVSYWKASEGAEYDD | 1858 | VSLHAVGVSYWKASEGADYDD |
| | 1838 | PVSLHAVGVSYWKASEGAEYD | 1859 | PVSLHAVGVSYWKASEGADYD |
| | 1839 | HPVSLHAVGVSYWKASEGAEY | 1860 | HPVSLHAVGVSYWKASEGADY |
| | 1840 | SHPVSLHAVGVSYWKASEGAE | 1861 | SHPVSLHAVGVSYWKASEGAD |

TABLE 89

| | ns-SNP TIPs | | | |
|---|---|---|---|---|
| | Major allele | | Minor allele | |
| | SEQ | | SEQ | |
| | ID | | ID | |
| F8 ns-SNPs | NO: | Q334 | NO: | P334 |
| Q334P | 1862 | QLRMKNNEEAEDYDDDLTDSE | 1883 | PLRMKNNEEAEDYDDDLTDSE |
| | 1863 | PQLRMKNNEEAEDYDDDLTDS | 1884 | PPLRMKNNEEAEDYDDDLTDS |
| | 1864 | EPQLRMKNNEEAEDYDDDLTD | 1885 | EPPLRMKNNEEAEDYDDDLTD |
| | 1865 | EEPQLRMKNNEEAEDYDDDLT | 1886 | EEPPLRMKNNEEAEDYDDDLT |
| | 1866 | PEEPQLRMKNNEEAEDYDDDL | 1887 | PEEPPLRMKNNEEAEDYDDDL |
| | 1867 | CPEEPQLRMKNNEEAEDYDDD | 1888 | CPEEPPLRMKNNEEAEDYDDD |
| | 1868 | SCPEEPQLRMKNNEEAEDYDD | 1889 | SCPEEPPLRMKNNEEAEDYDD |
| | 1869 | DSCPEEPQLRMKNNEEAEDYD | 1890 | DSCPEEPPLRMKNNEEAEDYD |
| | 1870 | VDSCPEEPQLRMKNNEEAEDY | 1891 | VDSCPEEPPLRMKNNEEAEDY |
| | 1871 | KVDSCPEEPQLRMKNNEEAED | 1892 | KVDSCPEEPPLRMKNNEEAED |
| | 1872 | VKVDSCPEEPQLRMKNNEEAE | 1893 | [sequence omitted] |
| | 1873 | YVKVDSCPEEPQLRMKNNEEA | 1894 | YVKVDSCPEEPPLRMKNNEEA |
| | 1874 | AYVKVDSCPEEPQLRMKNNEE | 1895 | AYVKVDSCPEEPPLRMKNNEE |
| | 1875 | EAYVKVDSCPEEPQLRMKNNE | 1896 | EAYVKVDSCPEEPPLRMKNNE |
| | 1876 | MEAYVKVDSCPEEPQLRMKNN | 1897 | MEAYVKVDSCPEEPPLRMKNN |
| | 1877 | GMEAYVKVDSCPEEPQLRMKN | 1898 | GMEAYVKVDSCPEEPPLRMKN |
| | 1878 | DGMEAYVKVDSCPEEPQLRMK | 1899 | DGMEAYVKVDSCPEEPPLRMK |
| | 1879 | HDGMEAYVKVDSCPEEPQLRM | 1900 | HDGMEAYVKVDSCPEEPPLRM |
| | 1880 | QHDGMEAYVKVDSCPEEPQLR | 1901 | [sequence omitted] |
| | 1881 | HQHDGMEAYVKVDSCPEEPQL | 1902 | HQHDGMEAYVKVDSCPEEPPL |
| | 1882 | SHQHDGMEAYVKVDSCPEEPQ | 1903 | SHQHDGMEAYVKVDSCPEEPP |

TABLE 90

| | ns-SNP TIPs | | | |
|---|---|---|---|---|
| | Major allele | | Minor allele | |
| | SEQ | | SEQ | |
| | ID | | ID | |
| F8 ns-SNPs | NO: | A387 | NO: | T387 |
| A387T | 1904 | AAEEEDWDYAPLVLAPDDRSY | 1925 | TAEEEDWDYAPLVLAPDDRSY |
| | 1905 | IAAEEEDWDYAPLVLAPDDRS | 1926 | ITAEEEDWDYAPLVLAPDDRS |
| | 1906 | YIAAEEEDWDYAPLVLAPDDR | 1927 | YITAEEEDWDYAPLVLAPDDR |
| | 1907 | HYIAAEEEDWDYAPLVLAPDD | 1928 | HYITAEEEDWDYAPLVLAPDD |
| | 1908 | VHYIAAEEEDWDYAPLVLAPD | 1929 | VHYITAEEEDWDYAPLVLAPD |
| | 1909 | WVHYIAAEEEDWDYAPLVLAP | 1930 | WVHYITAEEEDWDYAPLVLAP |
| | 1910 | TWVHYIAAEEEDWDYAPLVLA | 1931 | TWVHYITAEEEDWDYAPLVLA |
| | 1911 | KTWVHYIAAEEEDWDYAPLVL | 1932 | KTWVHYITAEEEDWDYAPLVL |
| | 1912 | PKTWVHYIAAEEEDWDYAPLV | 1933 | PKTWVHYITAEEEDWDYAPLV |
| | 1913 | HPKTWVHYIAAEEEDWDYAPL | 1934 | HPKTWVHYITAEEEDWDYAPL |
| | 1914 | KHPKTWVHYIAAEEEDWDYAP | 1935 | KHPKTWVHYITAEEEDWDYAP |
| | 1915 | KKHPKTWVHYIAAEEEDWDYA | 1936 | KKHPKTWVHYITAEEEDWDYA |
| | 1916 | AKKHPKTWVHYIAAEEEDWDY | 1937 | AKKHPKTWVHYITAEEEDWDY |
| | 1917 | VAKKHPKTWVHYIAAEEEDWD | 1938 | VAKKHPKTWVHYITAEEEDWD |
| | 1918 | SVAKKHPKTWVHYIAAEEEDW | 1939 | SVAKKHPKTWVHYITAEEEDW |
| | 1919 | RSVAKKHPKTWVHYIAAEEED | 1940 | RSVAKKHPKTWVHYITAEEED |
| | 1920 | IRSVAKKHPKTWVHYIAAEEE | 1941 | IRSVAKKHPKTWVHYITAEEE |
| | 1921 | QIRSVAKKHPKTWVHYIAAEE | 1942 | QIRSVAKKHPKTWVHYITAEE |
| | 1922 | IQIRSVAKKHPKTWVHYIAAE | 1943 | IQIRSVAKKHPKTWVHYITAE |
| | 1923 | FIQIRSVAKKHPKTWVHYIAA | 1944 | FIQIRSVAKKHPKTWVHYITA |
| | 1924 | SFIQIRSVAKKHPKTWVHYIA | 1945 | SFIQIRSVAKKHPKTWVHYIT |

TABLE 91

| | ns-SNP TIPs | | | |
|---|---|---|---|---|
| | Major allele | | Minor allele | |
| | SEQ | | SEQ | |
| | ID | | ID | |
| F8 ns-SNPs | NO: | R484 | NO: | H484 |
| R484H | 1946 | RPLYSRRLPKGVKHLKDFPIL | 1967 | HPLYSRRLPKGVKHLKDFPIL |
| | 1947 | VRPLYSRRLPKGVKHLKDFPI | 1968 | VHPLYSRRLPKGVKHLKDFPI |
| | 1948 | DVRPLYSRRLPKGVKHLKDFP | 1969 | DVHPLYSRRLPKGVKHLKDFP |
| | 1949 | TDVRPLYSRRLPKGVKHLKDF | 1970 | TDVHPLYSRRLPKGVKHLKDF |
| | 1950 | ITDVRPLYSRRLPKGVKHLKD | 1971 | ITDVHPLYSRRLPKGVKHLKD |
| | 1951 | GITDVRPLYSRRLPKGVKHLK | 1972 | GITDVHPLYSRRLPKGVKHLK |
| | 1952 | HGITDVRPLYSRRLPKGVKHL | 1973 | HGITDVHPLYSRRLPKGVKHL |
| | 1953 | PHGITDVRPLYSRRLPKGVKH | 1974 | [sequence omitted] |
| | 1954 | YPHGITDVRPLYSRRLPKGVK | 1975 | YPHGITDVHPLYSRRLPKGVK |
| | 1955 | IYPHGITDVRPLYSRRLPKGV | 1976 | IYPHGITDVHPLYSRRLPKGV |
| | 1956 | NIYPHGITDVRPLYSRRLPKG | 1977 | NIYPHGITDVHPLYSRRLPKG |
| | 1957 | YNIYPHGITDVRPLYSRRLPK | 1978 | YNIYPHGITDVHPLYSRRLPK |
| | 1958 | PYNIYPHGITDVRPLYSRRLP | 1979 | PYNIYPHGITDVHPLYSRRLP |
| | 1959 | RPYNIYPHGITDVRPLYSRRL | 1980 | RPYNIYPHGITDVHPLYSRRL |
| | 1960 | SRPYNIYPHGITDVRPLYSRR | 1981 | [sequence omitted] |
| | 1961 | ASRPYNIYPHGITDVRPLYSR | 1982 | ASRPYNIYPHGITDVHPLYSR |
| | 1962 | QASRPYNIYPHGITDVRPLYS | 1983 | QASRPYNIYPHGITDVHPLYS |
| | 1963 | NQASRPYNIYPHGITDVRPLY | 1984 | NQASRPYNIYPHGITDVHPLY |
| | 1964 | KNQASRPYNIYPHGITDVRPL | 1985 | KNQASRPYNIYPHGITDVHPL |
| | 1965 | FKNQASRPYNIYPHGITDVRP | 1986 | FKNQASRPYNIYPHGITDVHP |
| | 1966 | IFKNQASRPYNIYPHGITDVR | 1987 | IFKNQASRPYNIYPHGITDVH |

TABLE 92

| | ns-SNP TIPs | | | |
|---|---|---|---|---|
| | Major allele | | Minor allele | |
| | SEQ | | SEQ | |
| | ID | | ID | |
| F8 ns-SNPs | NO: | R776G | NO: | R776G |
| R776G | 1988 | RTPMPKIQNVSSSDLLMLLRQ | 2009 | [sequence omitted] |
| | 1989 | HRTPMPKIQNVSSSDLLMLLR | 2010 | HGTPMPKIQNVSSSDLLMLLR |
| | 1990 | AHRTPMPKIQNVSSSDLLMLL | 2011 | AHGTPMPKIQNVSSSDLLMLL |
| | 1991 | FAHRTPMPKIQNVSSSDLLML | 2012 | FAHGTPMPKIQNVSSSDLLML |
| | 1992 | WFAHRTPMPKIQNVSSSDLLM | 2013 | WFAHGTPMPKIQNVSSSDLLM |
| | 1993 | PWFAHRTPMPKIQNVSSSDLL | 2014 | PWFAHGTPMPKIQNVSSSDLL |
| | 1994 | DPWFAHRTPMPKIQNVSSSDL | 2015 | [sequence omitted] |
| | 1995 | TDPWFAHRTPMPKIQNVSSSD | 2016 | [sequence omitted] |
| | 1996 | KTDPWFAHRTPMPKIQNVSSS | 2017 | KTDPWFAHGTPMPKIQNVSSS |
| | 1997 | EKTDPWFAHRTPMPKIQNVSS | 2018 | EKTDPWFAHGTPMPKIQNVSS |
| | 1998 | IEKTDPWFAHRTPMPKIQNVS | 2019 | [sequence omitted] |
| | 1999 | DIEKTDPWFAHRTPMPKIQNV | 2020 | DIEKTDPWFAHGTPMPKIQNV |
| | 2000 | NDIEKTDPWFAHRTPMPKIQN | 2021 | NDIEKTDPWFAHGTPMPKIQN |
| | 2001 | ENDIEKTDPWFAHRTPMPKIQ | 2022 | [sequence omitted] |
| | 2002 | PENDIEKTDPWFAHRTPMPKI | 2023 | PENDIEKTDPWFAHGTPMPKI |
| | 2003 | IPENDIEKTDPWFAHRTPMPK | 2024 | IPENDIEKTDPWFAHGTPMPK |
| | 2004 | TIPENDIEKTDPWFAHRTPMP | 2025 | TIPENDIEKTDPWFAHGTPMP |
| | 2005 | TTIPENDIEKTDPWFAHRTPM | 2026 | TTIPENDIEKTDPWFAHGTPM |
| | 2006 | ATTIPENDIEKTDPWFAHRTP | 2027 | ATTIPENDIEKTDPWFAHGTP |
| | 2007 | NATTIPENDIEKTDPWFAHRT | 2028 | NATTIPENDIEKTDPWFAHGT |
| | 2008 | FNATTIPENDIEKTDPWFAHR | 2029 | FNATTIPENDIEKTDPWFAHG |

TABLE 93

| | ns-SNP TIPs | | | |
|---|---|---|---|---|
| | Major allele | | Minor allele | |
| | SEQ | | SEQ | |
| | ID | | ID | |
| F8 ns-SNPs | NO: | R1107 | NO: | W1107 |
| R1107W | 2030 | RWIQRTHGKNSLNSGQGPSPK | 2051 | WWIQRTHGKNSLNSGQGPSPK |
| | 2031 | ARWIQRTHGKNSLNSGQGPSP | 2052 | AWWIQRTHGKNSLNSGQGPSP |
| | 2032 | SARWIQRTHGKNSLNSGQGPS | 2053 | SAWWIQRTHGKNSLNSGQGPS |
| | 2033 | ESARWIQRTHGKNSLNSGQGP | 2054 | ESAWWIQRTHGKNSLNSGQGP |
| | 2034 | PESARWIQRTHGKNSLNSGQG | 2055 | PESAWWIQRTHGKNSLNSGQG |
| | 2035 | LPESARWIQRTHGKNSLNSGQ | 2056 | LPESAWWIQRTHGKNSLNSGQ |
| | 2036 | FLPESARWIQRTHGKNSLNSG | 2057 | FLPESAWWIQRTHGKNSLNSG |
| | 2037 | LFLPESARWIQRTHGKNSLNS | 2058 | LFLPESAWWIQRTHGKNSLNS |
| | 2038 | MLFLPESARWIQRTHGKNSLN | 2059 | MLFLPESAWWIQRTHGKNSLN |
| | 2039 | KMLFLPESARWIQRTHGKNSL | 2060 | KMLFLPESAWWIQRTHGKNSL |
| | 2040 | FKMLFLPESARWIQRTHGKNS | 2061 | [sequence omitted] |
| | 2041 | FFKMLFLPESARWIQRTHGKN | 2062 | FFKMLFLPESAWWIQRTHGKN |
| | 2042 | SFFKMLFLPESARWIQRTHGK | 2063 | SFFKMLFLPESAWWIQRTHGK |
| | 2043 | MSFFKMLFLPESARWIQRTHG | 2064 | MSFFKMLFLPESAWWIQRTHG |
| | 2044 | DMSFFKMLFLPESARWIQRTH | 2065 | DMSFFKMLFLPESAWWIQRTH |
| | 2045 | PDMSFFKMLFLPESARWIQRT | 2066 | PDMSFFKMLFLPESAWWIQRT |
| | 2046 | NPDMSFFKMLFLPESARWIQR | 2067 | NPDMSFFKMLFLPESAWWIQR |
| | 2047 | QNPDMSFFKMLFLPESARWIQ | 2068 | QNPDMSFFKMLFLPESAWWIQ |
| | 2048 | AQNPDMSFFKMLFLPESARWI | 2069 | AQNPDMSFFKMLFLPESAWWI |
| | 2049 | DAQNPDMSFFKMLFLPESARW | 2070 | DAQNPDMSFFKMLFLPESAWW |
| | 2050 | PDAQNPDMSFFKMLFLPESAR | 2071 | PDAQNPDMSFFKMLFLPESAW |

TABLE 94

| | ns-SNP TIPs | | | |
|---|---|---|---|---|
| | Major allele | | Minor allele | |
| | SEQ | | SEQ | |
| | ID | | ID | |
| F8 ns-SNPs | NO: | D1241E | NO: | D1241E |
| D1241E | 2072 | DGAYAPVLQDFRSLNDSTNRT | 2093 | EGAYAPVLQDFRSLNDSTNRT |
| | 2073 | YDGAYAPVLQDFRSLNDSTNR | 2094 | YEGAYAPVLQDFRSLNDSTNR |
| | 2074 | SYDGAYAPVLQDFRSLNDSTN | 2095 | SYEGAYAPVLQDFRSLNDSTN |
| | 2075 | GSYDGAYAPVLQDFRSLNDST | 2096 | GSYEGAYAPVLQDFRSLNDST |
| | 2076 | EGSYDGAYAPVLQDFRSLNDS | 2097 | EGSYEGAYAPVLQDFRSLNDS |
| | 2077 | VEGSYDGAYAPVLQDFRSLND | 2098 | VEGSYEGAYAPVLQDFRSLND |
| | 2078 | NVEGSYDGAYAPVLQDFRSLN | 2099 | NVEGSYEGAYAPVLQDFRSLN |
| | 2079 | QNVEGSYDGAYAPVLQDFRSL | 2100 | QNVEGSYEGAYAPVLQDFRSL |
| | 2080 | RQNVEGSYDGAYAPVLQDFRS | 2101 | RQNVEGSYEGAYAPVLQDFRS |
| | 2081 | TRQNVEGSYDGAYAPVLQDFR | 2102 | TRQNVEGSYEGAYAPVLQDFR |
| | 2082 | STRQNVEGSYDGAYAPVLQDF | 2103 | STRQNVEGSYEGAYAPVLQDF |
| | 2083 | LSTRQNVEGSYDGAYAPVLQD | 2104 | LSTRQNVEGSYEGAYAPVLQD |
| | 2084 | LLSTRQNVEGSYDGAYAPVLQ | 2105 | LLSTRQNVEGSYEGAYAPVLQ |
| | 2085 | FLLSTRQNVEGSYDGAYAPVL | 2106 | FLLSTRQNVEGSYEGAYAPVL |
| | 2086 | LFLLSTRQNVEGSYDGAYAPV | 2107 | LFLLSTRQNVEGSYEGAYAPV |
| | 2087 | NLFLLSTRQNVEGSYDGAYAP | 2108 | NLFLLSTRQNVEGSYEGAYAP |
| | 2088 | KNLFLLSTRQNVEGSYDGAYA | 2109 | KNLFLLSTRQNVEGSYEGAYA |
| | 2089 | MKNLFLLSTRQNVEGSYDGAY | 2110 | MKNLFLLSTRQNVEGSYEGAY |
| | 2090 | FMKNLFLLSTRQNVEGSYDGA | 2111 | FMKNLFLLSTRQNVEGSYEGA |
| | 2091 | NFMKNLFLLSTRQNVEGSYDG | 2112 | NFMKNLFLLSTRQNVEGSYEG |
| | 2092 | KNFMKNLFLLSTRQNVEGSYD | 2113 | KNFMKNLFLLSTRQNVEGSYE |

TABLE 95

| | ns-SNP TIPs | | | |
|---|---|---|---|---|
| | Major allele | | Minor allele | |
| | SEQ | | SEQ | |
| | ID | | ID | |
| F8 ns-SNPs | NO: | R1260K | NO: | R1260K |
| R1260K | 2114 | RTKKHTAHFSKKGEEENLEGL | 2135 | KTKKHTAHFSKKGEEENLEGL |
| | 2115 | NRTKKHTAHFSKKGEEENLEG | 2136 | NKTKKHTAHFSKKGEEENLEG |
| | 2116 | TNRTKKHTAHFSKKGEEENLE | 2137 | TNKTKKHTAHFSKKGEEENLE |
| | 2117 | STNRTKKHTAHFSKKGEEENL | 2138 | STNKTKKHTAHFSKKGEEENL |
| | 2118 | DSTNRTKKHTAHFSKKGEEEN | 2139 | DSTNKTKKHTAHFSKKGEEEN |
| | 2119 | NDSTNRTKKHTAHFSKKGEEE | 2140 | NDSTNKTKKHTAHFSKKGEEE |
| | 2120 | LNDSTNRTKKHTAHFSKKGEE | 2141 | LNDSTNKTKKHTAHFSKKGEE |
| | 2121 | SLNDSTNRTKKHTAHFSKKGE | 2142 | SLNDSTNKTKKHTAHFSKKGE |
| | 2122 | RSLNDSTNRTKKHTAHFSKKG | 2143 | RSLNDSTNKTKKHTAHFSKKG |
| | 2123 | FRSLNDSTNRTKKHTAHFSKK | 2144 | FRSLNDSTNKTKKHTAHFSKK |
| | 2124 | DFRSLNDSTNRTKKHTAHFSK | 2145 | DFRSLNDSTNKTKKHTAHFSK |
| | 2125 | QDFRSLNDSTNRTKKHTAHFS | 2146 | QDFRSLNDSTNKTKKHTAHFS |
| | 2126 | LQDFRSLNDSTNRTKKHTAHF | 2147 | LQDFRSLNDSTNKTKKHTAHF |
| | 2127 | VLQDFRSLNDSTNRTKKHTAH | 2148 | VLQDFRSLNDSTNKTKKHTAH |
| | 2128 | PVLQDFRSLNDSTNRTKKHTA | 2149 | PVLQDFRSLNDSTNKTKKHTA |
| | 2129 | APVLQDFRSLNDSTNRTKKHT | 2150 | APVLQDFRSLNDSTNKTKKHT |
| | 2130 | YAPVLQDFRSLNDSTNRTKKH | 2151 | YAPVLQDFRSLNDSTNKTKKH |
| | 2131 | AYAPVLQDFRSLNDSTNRTKK | 2152 | AYAPVLQDFRSLNDSTNKTKK |
| | 2132 | GAYAPVLQDFRSLNDSTNRTK | 2153 | GAYAPVLQDFRSLNDSTNKTK |
| | 2133 | DGAYAPVLQDFRSLNDSTNRT | 2154 | DGAYAPVLQDFRSLNDSTNKT |
| | 2134 | YDGAYAPVLQDFRSLNDSTNR | 2155 | YDGAYAPVLQDFRSLNDSTNK |

TABLE 96

| | ns-SNP TIPs | | | |
|---|---|---|---|---|
| | Major allele | | Minor allele | |
| | SEQ | | SEQ | |
| | ID | | ID | |
| F8 ns-SNPs | NO: | L1462 | NO: | P1462 |
| L1462P | 2156 | LGTSATNSVTYKKVENTVLPK | 2177 | PGTSATNSVTYKKVENTVLPK |
| | 2157 | SLGTSATNSVTYKKVENTVLP | 2178 | SPGTSATNSVTYKKVENTVLP |
| | 2158 | GSLGTSATNSVTYKKVENTVL | 2179 | [sequence omitted] |
| | 2159 | VGSLGTSATNSVTYKKVENTV | 2180 | [sequence omitted] |
| | 2160 | EVGSLGTSATNSVTYKKVENT | 2181 | EVGSPGTSATNSVTYKKVENT |
| | 2161 | REVGSLGTSATNSVTYKKVEN | 2182 | [sequence omitted] |
| | 2162 | QREVGSLGTSATNSVTYKKVE | 2183 | [sequence omitted] |
| | 2163 | DQREVGSLGTSATNSVTYKKV | 2184 | [sequence omitted] |
| | 2164 | GDQREVGSLGTSATNSVTYKK | 2185 | [sequence omitted] |
| | 2165 | TGDQREVGSLGTSATNSVTYK | 2186 | TGDQREVGSPGTSATNSVTYK |
| | 2166 | MTGDQREVGSLGTSATNSVTY | 2187 | MTGDQREVGSPGTSATNSVTY |
| | 2167 | EMTGDQREVGSLGTSATNSVT | 2188 | [sequence omitted] |
| | 2168 | LEMTGDQREVGSLGTSATNSV | 2189 | LEMTGDQREVGSPGTSATNSV |
| | 2169 | TLEMTGDQREVGSLGTSATNS | 2190 | TLEMTGDQREVGSPGTSATNS |
| | 2170 | LTLEMTGDQREVGSLGTSATN | 2191 | [sequence omitted] |
| | 2171 | ILTLEMTGDQREVGSLGTSAT | 2192 | [sequence omitted] |
| | 2172 | AILTLEMTGDQREVGSLGTSA | 2193 | AILTLEMTGDQREVGSPGTSA |
| | 2173 | LAILTLEMTGDQREVGSLGTS | 2194 | LAILTLEMTGDQREVGSPGTS |
| | 2174 | SLAILTLEMTGDQREVGSLGT | 2195 | [sequence omitted] |
| | 2175 | LSLAILTLEMTGDQREVGSLG | 2196 | LSLAILTLEMTGDQREVGSPG |
| | 2176 | NLSLAILTLEMTGDQREVGSL | 2197 | NLSLAILTLEMTGDQREVGSP |

TABLE 97

| | ns-SNP TIPs | | | |
|---|---|---|---|---|
| | Major allele | | Minor allele | |
| | SEQ | | SEQ | |
| | ID | | ID | |
| F8 ns-SNPs | NO: | I1668 | NO: | V1668 |
| I1668V | 2198 | ISVEMKKEDFDIYDEDENQSP | 2219 | VSVEMKKEDFDIYDEDENQSP |
| | 2199 | TISVEMKKEDFDIYDEDENQS | 2220 | TVSVEMKKEDFDIYDEDENQS |
| | 2200 | DTISVEMKKEDFDIYDEDENQ | 2221 | DTVSVEMKKEDFDIYDEDENQ |
| | 2201 | DDTISVEMKKEDFDIYDEDEN | 2222 | DDTVSVEMKKEDFDIYDEDEN |
| | 2202 | YDDTISVEMKKEDFDIYDEDE | 2223 | YDDTVSVEMKKEDFDIYDEDE |
| | 2203 | DYDDTISVEMKKEDFDIYDED | 2224 | DYDDTVSVEMKKEDFDIYDED |
| | 2204 | IDYDDTISVEMKKEDFDIYDE | 2225 | IDYDDTVSVEMKKEDFDIYDE |
| | 2205 | EIDYDDTISVEMKKEDFDIYD | 2226 | EIDYDDTVSVEMKKEDFDIYD |
| | 2206 | EEIDYDDTISVEMKKEDFDIY | 2227 | EEIDYDDTVSVEMKKEDFDIY |
| | 2207 | QEEIDYDDTISVEMKKEDFDI | 2228 | QEEIDYDDTVSVEMKKEDFDI |
| | 2208 | DQEEIDYDDTISVEMKKEDFD | 2229 | DQEEIDYDDTVSVEMKKEDFD |
| | 2209 | SDQEEIDYDDTISVEMKKEDF | 2230 | SDQEEIDYDDTVSVEMKKEDF |
| | 2210 | QSDQEEIDYDDTISVEMKKED | 2231 | QSDQEEIDYDDTVSVEMKKED |
| | 2211 | LQSDQEEIDYDDTISVEMKKE | 2232 | LQSDQEEIDYDDTVSVEMKKE |
| | 2212 | TLQSDQEEIDYDDTISVEMKK | 2233 | TLQSDQEEIDYDDTVSVEMKK |
| | 2213 | TTLQSDQEEIDYDDTISVEMK | 2234 | TTLQSDQEEIDYDDTVSVEMK |
| | 2214 | RTTLQSDQEEIDYDDTISVEM | 2235 | RTTLQSDQEEIDYDDTVSVEM |
| | 2215 | TRTTLQSDQEEIDYDDTISVE | 2236 | TRTTLQSDQEEIDYDDTVSVE |
| | 2216 | ITRTTLQSDQEEIDYDDTISV | 2237 | ITRTTLQSDQEEIDYDDTVSV |
| | 2217 | EITRTTLQSDQEEIDYDDTIS | 2238 | EITRTTLQSDQEEIDYDDTVS |
| | 2218 | REITRTTLQSDQEEIDYDDTI | 2239 | REITRTTLQSDQEEIDYDDTV |

TABLE 98

| | ns-SNP TIPs | | | |
|---|---|---|---|---|
| | Major allele | | Minor allele | |
| | SEQ | | SEQ | |
| | ID | | ID | |
| F8 ns-SNPs | NO: | E2004 | NO: | K2004 |
| E2004K | 2240 | EHLHAGMSTLFLVYSNKCQTP | 2261 | KHLHAGMSTLFLVYSNKCQTP |
| | 2241 | GEHLHAGMSTLFLVYSNKCQT | 2262 | [sequence omitted] |
| | 2242 | IGEHLHAGMSTLFLVYSNKCQ | 2263 | IGKHLHAGMSTLFLVYSNKCQ |
| | 2243 | LIGEHLHAGMSTLFLVYSNKC | 2264 | LIGKHLHAGMSTLFLVYSNKC |
| | 2244 | CLIGEHLHAGMSTLFLVYSNK | 2265 | CLIGKHLHAGMSTLFLVYSNK |
| | 2245 | ECLIGEHLHAGMSTLFLVYSN | 2266 | ECLIGKHLHAGMSTLFLVYSN |
| | 2246 | VECLIGEHLHAGMSTLFLVYS | 2267 | VECLIGKHLHAGMSTLFLVYS |
| | 2247 | RVECLIGEHLHAGMSTLFLVY | 2268 | RVECLIGKHLHAGMSTLFLVY |
| | 2248 | WRVECLIGEHLHAGMSTLFLV | 2269 | WRVECLIGKHLHAGMSTLFLV |
| | 2249 | IWRVECLIGEHLHAGMSTLFL | 2270 | IWRVECLIGKHLHAGMSTLFL |
| | 2250 | GIWRVECLIGEHLHAGMSTLF | 2271 | GIWRVECLIGKHLHAGMSTLF |
| | 2251 | AGIWRVECLIGEHLHAGMSTL | 2272 | AGIWRVECLIGKHLHAGMSTL |
| | 2252 | KAGIWRVECLIGEHLHAGMST | 2273 | KAGIWRVECLIGKHLHAGMST |
| | 2253 | SKAGIWRVECLIGEHLHAGMS | 2274 | SKAGIWRVECLIGKHLHAGMS |
| | 2254 | PSKAGIWRVECLIGEHLHAGM | 2275 | PSKAGIWRVECLIGKHLHAGM |
| | 2255 | LPSKAGIWRVECLIGEHLHAG | 2276 | LPSKAGIWRVECLIGKHLHAG |
| | 2256 | MLPSKAGIWRVECLIGEHLHA | 2277 | MLPSKAGIWRVECLIGKHLHA |
| | 2257 | EMLPSKAGIWRVECLIGEHLH | 2278 | EMLPSKAGIWRVECLIGKHLH |
| | 2258 | VEMLPSKAGIWRVECLIGEHL | 2279 | VEMLPSKAGIWRVECLIGKHL |
| | 2259 | TVEMLPSKAGIWRVECLIGEH | 2280 | TVEMLPSKAGIWRVECLIGKH |
| | 2260 | ETVEMLPSKAGIWRVECLIGE | 2281 | ETVEMLPSKAGIWRVECLIGK |

TABLE 99

| | ns-SNP TIPs | | | |
|---|---|---|---|---|
| | Major allele | | Minor allele | |
| | SEQ | | SEQ | |
| | ID | | ID | |
| F8 ns-SNPs | NO: | V2223 | NO: | M2223 |
| V2223M | 2282 | VNNPKEWLQVDFQKTMKVTGV | 2303 | MNNPKEWLQVDFQKTMKVTGV |
| | 2283 | QVNNPKEWLQVDFQKTMKVTG | 2304 | QMNNPKEWLQVDFQKTMKVTG |
| | 2284 | PQVNNPKEWLQVDFQKTMKVT | 2305 | PQMNNPKEWLQVDFQKTMKVT |
| | 2285 | RPQVNNPKEWLQVDFQKTMKV | 2306 | RPQMNNPKEWLQVDFQKTMKV |
| | 2286 | WRPQVNNPKEWLQVDFQKTMK | 2307 | WRPQMNNPKEWLQVDFQKTMK |
| | 2287 | AWRPQVNNPKEWLQVDFQKTM | 2308 | AWRPQMNNPKEWLQVDFQKTM |
| | 2288 | NAWRPQVNNPKEWLQVDFQKT | 2309 | NAWRPQMNNPKEWLQVDFQKT |
| | 2289 | SNAWRPQVNNPKEWLQVDFQK | 2310 | SNAWRPQMNNPKEWLQVDFQK |
| | 2290 | RSNAWRPQVNNPKEWLQVDFQ | 2311 | RSNAWRPQMNNPKEWLQVDFQ |
| | 2291 | GRSNAWRPQVNNPKEWLQVDF | 2312 | GRSNAWRPQMNNPKEWLQVDF |
| | 2292 | QGRSNAWRPQVNNPKEWLQVD | 2313 | [sequence omitted] |
| | 2293 | LQGRSNAWRPQVNNPKEWLQV | 2314 | LQGRSNAWRPQMNNPKEWLQV |
| | 2294 | HLQGRSNAWRPQVNNPKEWLQ | 2315 | HLQGRSNAWRPQMNNPKEWLQ |
| | 2295 | LHLQGRSNAWRPQVNNPKEWL | 2316 | [sequence omitted] |
| | 2296 | RLHLQGRSNAWRPQVNNPKEW | 2317 | RLHLQGRSNAWRPQMNNPKEW |
| | 2297 | ARLHLQGRSNAWRPQVNNPKE | 2318 | ARLHLQGRSNAWRPQMNNPKE |
| | 2298 | KARLHLQGRSNAWRPQVNNPK | 2319 | KARLHLQGRSNAWRPQMNNPK |
| | 2299 | SKARLHLQGRSNAWRPQVNNP | 2320 | SKARLHLQGRSNAWRPQMNNP |
| | 2300 | PSKARLHLQGRSNAWRPQVNN | 2321 | PSKARLHLQGRSNAWRPQMNN |
| | 2301 | SPSKARLHLQGRSNAWRPQVN | 2322 | SPSKARLHLQGRSNAWRPQMN |
| | 2302 | WSPSKARLHLQGRSNAWRPQV | 2323 | WSPSKARLHLQGRSNAWRPQM |

TABLE 100

| | ns-SNP TIPs | | | |
|---|---|---|---|---|
| | Major allele | | Minor allele | |
| | SEQ | | SEQ | |
| | ID | | ID | |
| F8 ns-SNPs | NO: | M2238V | NO: | M2238V |
| M2238V | 2324 | MKVTGVTTQGVKSLLTSMYVK | 2345 | VKVTGVTTQGVKSLLTSMYVK |
| | 2325 | TMKVTGVTTQGVKSLLTSMYV | 2346 | TVKVTGVTTQGVKSLLTSMYV |
| | 2326 | KTMKVTGVTTQGVKSLLTSMY | 2347 | KTVKVTGVTTQGVKSLLTSMY |
| | 2327 | QKTMKVTGVTTQGVKSLLTSM | 2348 | QKTVKVTGVTTQGVKSLLTSM |
| | 2328 | FQKTMKVTGVTTQGVKSLLTS | 2349 | FQKTVKVTGVTTQGVKSLLTS |
| | 2329 | DFQKTMKVTGVTTQGVKSLLT | 2350 | DFQKTVKVTGVTTQGVKSLLT |
| | 2330 | VDFQKTMKVTGVTTQGVKSLL | 2351 | VDFQKTVKVTGVTTQGVKSLL |
| | 2331 | QVDFQKTMKVTGVTTQGVKSL | 2352 | QVDFQKTVKVTGVTTQGVKSL |
| | 2332 | LQVDFQKTMKVTGVTTQGVKS | 2353 | LQVDFQKTVKVTGVTTQGVKS |
| | 2333 | WLQVDFQKTMKVTGVTTQGVK | 2354 | WLQVDFQKTVKVTGVTTQGVK |
| | 2334 | EWLQVDFQKTMKVTGVTTQGV | 2355 | EWLQVDFQKTVKVTGVTTQGV |
| | 2335 | KEWLQVDFQKTMKVTGVTTQG | 2356 | KEWLQVDFQKTVKVTGVTTQG |
| | 2336 | PKEWLQVDFQKTMKVTGVTTQ | 2357 | PKEWLQVDFQKTVKVTGVTTQ |
| | 2337 | NPKEWLQVDFQKTMKVTGVTT | 2358 | NPKEWLQVDFQKTVKVTGVTT |
| | 2338 | NNPKEWLQVDFQKTMKVTGVT | 2359 | NNPKEWLQVDFQKTVKVTGVT |
| | 2339 | VNNPKEWLQVDFQKTMKVTGV | 2360 | VNNPKEWLQVDFQKTVKVTGV |
| | 2340 | QVNNPKEWLQVDFQKTMKVTG | 2361 | QVNNPKEWLQVDFQKTVKVTG |
| | 2341 | PQVNNPKEWLQVDFQKTMKVT | 2362 | PQVNNPKEWLQVDFQKTVKVT |
| | 2342 | RPQVNNPKEWLQVDFQKTMKV | 2363 | RPQVNNPKEWLQVDFQKTVKV |
| | 2343 | WRPQVNNPKEWLQVDFQKTMK | 2364 | WRPQVNNPKEWLQVDFQKTV |
| | 2344 | AWRPQVNNPKEWLQVDFQKTM | 2365 | AWRPQVNNPKEWLQVDFQKTV |

TABLE 101

| | ns-SNP TIPs | | | |
|---|---|---|---|---|
| | Major allele | | Minor allele | |
| | SEQ | | SEQ | |
| | ID | | ID | |
| F8 ns-SNPs | NO: | P2292 | NO: | S2292 |
| P2292S | 2366 | PVVNSLDPPLLTRYLRIHPQS | 2387 | SVVNSLDPPLLTRYLRIHPQS |
| | 2367 | TPVVNSLDPPLLTRYLRIHPQ | 2388 | TSVVNSLDPPLLTRYLRIHPQ |
| | 2368 | FTPVVNSLDPPLLTRYLRIHP | 2389 | FTSVVNSLDPPLLTRYLRIHP |
| | 2369 | SFTPVVNSLDPPLLTRYLRIH | 2390 | SFTSVVNSLDPPLLTRYLRIH |
| | 2370 | DSFTPVVNSLDPPLLTRYLRI | 2391 | DSFTSVVNSLDPPLLTRYLRI |
| | 2371 | QDSFTPVVNSLDPPLLTRYLR | 2392 | QDSFTSVVNSLDPPLLTRYLR |
| | 2372 | NQDSFTPVVNSLDPPLLTRYL | 2393 | NQDSFTSVVNSLDPPLLTRYL |
| | 2373 | GNQDSFTPVVNSLDPPLLTRY | 2394 | GNQDSFTSVVNSLDPPLLTRY |
| | 2374 | QGNQDSFTPVVNSLDPPLLTR | 2395 | QGNQDSFTSVVNSLDPPLLTR |
| | 2375 | FQGNQDSFTPVVNSLDPPLLT | 2396 | FQGNQDSFTSVVNSLDPPLLT |
| | 2376 | VFQGNQDSFTPVVNSLDPPLL | 2397 | VFQGNQDSFTSVVNSLDPPLL |
| | 2377 | KVFQGNQDSFTPVVNSLDPPL | 2398 | KVFQGNQDSFTSVVNSLDPPL |
| | 2378 | VKVFQGNQDSFTPVVNSLDPP | 2399 | [sequence omitted] |
| | 2379 | KVKVFQGNQDSFTPVVNSLDP | 2400 | KVKVFQGNQDSFTSVVNSLDP |
| | 2380 | GKVKVFQGNQDSFTPVVNSLD | 2401 | GKVKVFQGNQDSFTSVVNSLD |
| | 2381 | NGKVKVFQGNQDSFTPVVNSL | 2402 | NGKVKVFQGNQDSFTSVVNSL |
| | 2382 | QNGKVKVFQGNQDSFTPVVNS | 2403 | QNGKVKVFQGNQDSFTSVVNS |
| | 2383 | FQNGKVKVFQGNQDSFTPVVN | 2404 | FQNGKVKVFQGNQDSFTSVVN |
| | 2384 | FFQNGKVKVFQGNQDSFTPVV | 2405 | FFQNGKVKVFQGNQDSFTSVV |
| | 2385 | LFFQNGKVKVFQGNQDSFTPV | 2406 | LFFQNGKVKVFQGNQDSFTSV |
| | 2386 | TLFFQNGKVKVFQGNQDSFTP | 2407 | TLFFQNGKVKVFQGNQDSFTS |

[0103] In certain aspects of the present invention, compositions directed to specific TIPs and TIP sets described in Table 102, and methods using the compositions thereof, are provided herein. In one embodiment, at least one or more TIPs comprising at least 9 amino acids, at least 10 amino acids, at least 11 amino acids, at least 12 amino acids, at least 13 amino acids, at least 14 amino acids, at least 15 amino acids, at least 16 amino acids, at least 17 amino acids, at least 18 amino acids, at least 19 amino acids, or at least 20 amino acids, including at the reference locus based on an intron 22 inversion, identified in Table 102 are provided. In one embodiment, at least one TIP set comprising at least 9 peptides, at least 10 peptides, at least 11 peptides, at least 12 peptides, at least 13 peptides, at 14 peptides, 15 peptides, at least 16 peptides, at least 17 peptides, at least 18 peptides, at least 19 peptides, or at least 20 peptides, wherein the first peptide of the set comprises a first reference locus M from the reference locus MV at its first amino acid position, the second peptide of the set comprises the reference locus M at its second amino acid position, and each successive peptide in the set comprises the reference locus M at an amino acid position frame-shifted one position downstream from the reference locus position of the preceding peptide, and wherein the last peptide of the set has the reference locus V in its last amino acid position, wherein the TIP sets are generated from the TIPs identified in Table 102, are provided herein (reference locus underlined and bolded). Table 102 is provided below.

TABLE 102

| FVIIIrp Reference | SEQ ID | |
|---|---|---|
| Locus | NO: | F8_{I22I} TIPs |
| MV | 2408 | MVFFGNVDSSGIKHNIFNPPI |
| | 2409 | LMVFGNVDSSGIKHNIFNPP |
| | 2410 | TLMVFFGNVDSSGIKHNIFNP |
| | 2411 | GTLMVFFGNVDSSGIKHNIFN |
| | 2412 | TGTLMVFFGNVDSSGIKHNIF |
| | 2413 | STGTLMVFFGNVDSSGIKHNI |
| | 2414 | NSTGTLMVFFGNVDSSGIKHN |
| | 2415 | GNSTGTLMVFFGNVDSSGIKH |
| | 2416 | RGNSTGTLMVFFGNVDSSGIK |
| | 2417 | YRGNSTGTLMVFFGNVDSSGI |
| | 2418 | TYRGNSTGTLMVFFGNVDSSG |
| | 2419 | QTYRGNSTGTLMVFFGNVDSS |
| | 2420 | WQTYRGNSTGTLMVFFGNVDS |
| | 2421 | KWQTYRGNSTGTLMVFFGNVD |
| | 2422 | KKWQTYRGNSTGTLMVFFGNV |
| | 2423 | GKKWQTYRGNSTGTLMVFFGN |
| | 2424 | DGKKWQTYRGNSTGTLMVFFG |
| | 2425 | LDGKKWQTYRGNSTGTLMVFF |
| | 2426 | SLDGKKWQTYRGNSTGTLMVF |
| | 2427 | YSLDGKKWQTYRGNSTGTLMV |

[0104] In certain aspects of the present invention, compositions directed to specific TIPs and TIP sets described in Table 103, and methods using the compositions thereof, are provided herein. In one embodiment, at least one or more TIPs comprising at least 9 amino acids, at least 10 amino acids, at least 11 amino acids, at least 12 amino acids, at least 13 amino acids, at least 14 amino acids, or at least 15 amino acids, including at the reference locus based on the use of a BDD-rFVIIIrp containing a synthetic linker, identified in Table 103 are provided. In one embodiment, at least one TIP set comprising at least 5 peptides, at least 6 peptides, at least 7 peptides, at least 8 peptides, at least 9 peptides, at least 10 peptides, or at least 11 peptides, wherein the first peptide of the set comprises an amino acid residue located +1 residues upstream from the reference locus at its first amino acid position and the reference locus is positioned as the second amino acid, the second peptide of the set comprises a reference locus at its third amino acid position, and each successive peptide in the set comprises a reference locus at an amino acid position frame-shifted one position downstream from the reference locus position of the preceding peptide, and wherein the last peptide of the set has the reference locus in its fourth from the last amino acid position, wherein the TIP sets are generated from the TIPs identified in Table 103, are provided herein (reference locus bolded and underlined). Tables 103 are provided below.

TABLE 103

| Reference | BDD- | SEQ | |
|---|---|---|---|
| Locus Position | rFVIIIrp | ID | |
| within BDD-rFVIIIrp | Linker | NO: | TIP Set |
| 743 | S-Q-N | 2428 | FSQNPPVLKRHQREI |
| | | 2429 | SFSQNPPVLKRHQRE |
| | | 2430 | RSFSQNPPVLKRHQR |
| | | 2431 | PRSFSQNPPVLKRHQ |
| | | 2432 | EPRSFSQNPPVLKRH |
| | | 2433 | IEPRSFSQNPPVLKR |
| | | 2434 | AIEPRSFSQNPPVLK |
| | | 2435 | NAIEPRSFSQNPPVL |
| | | 2436 | NNAIEPRSFSQNPPV |
| | | 2437 | KNNAIEPRSFSQNPP |
| | | 2438 | SKNNAIEPRSFSQNP |

[0105] The TIPs and TIP sets described herein are synthesized using any known peptide synthesizing protocol. For example, peptides of the present invention can be synthesized by a 9-fluorenylmethoxy-carbonyl (Fmoc) method on an automated peptide synthesizer, for example an automated Rainen Symphony/Protein Technologies synthesizer. Peptides can be purified by HPLC to remove impurities.

[0106] Association with Carrier

[0107] The TIPs described herein can be associated with a carrier. Accordingly, compositions and methods using such compositions thereof are contemplated herein comprising TIPs as described herein in association with a carrier.

[0108] Carrier can include for example, natural or synthetic compounds. In some embodiments, a carrier includes cell-based particles, including cells such as antigen presenting cells including dendritic cells such as immature dendritic cells. In certain embodiments, the carrier can be, but are not limited to, a B cells, T cell, a leukocyte such as a splenic leukocytes or isologous leukocyte. The TIP can be bound to the cells, or alternatively, ingested by or pulsed into the cells for processing and subsequent presentation.

[0109] In one embodiment the TIPs are coupled to isologous splenocytes using ECDI as described in Getts et al. (Micro-particles bearing encephalitogenic peptides induce T-cell tolerance and ameliorate experimental autoimmune encephalomyelitis. Nature Biotechnology 2012 (http://www.nature.com/doifinder/10.1038/nbt.2434).

[0110] In some embodiments, the carrier is a hapten or immunoglobulin including but not limited to a fragmented IgG Fc fragment. In one embodiment, the carrier is a haptenated immunoglobulin.

[0111] In one embodiment, the carrier molecule is mannose-6-phosphate.

[0112] In some embodiments, the carrier is a micro- or nano-particle, such as a polymeric micro- or nano-particle. Micro- or nano-particles may comprise natural polymers, including but not limited to chitosan, alginate, dextran, gelatin, and albumin, and synthetic polymers such as, but not limited to, poly(lactide-co-glycolide) (PLGA), (3-hydroxybutyrate-co-3-hydroxyvalerate) (PHBV), poly(sebacic anhydride), poly(ε-caprolactone), polystyrene, thermoresponsive (i.e., NIPAAm and CMCTS-g-PDEA) and pH-responsive (i.e., Eudragit L100, Eudragit S and AQOAT AS-MG) polymers.

[0113] In one embodiment, the polymeric micro- or nano-particle is between about 0.1 nm to about 10000 nm, between about 1 nm to about 1000 nm, between about 10 nm and 1000 nm, between about 100 nm and 800 nm, between about 400 nm and 600 nm, or about 500 nm. In one embodiment, the micro- or nano-particles are about 0.1 nm, 0.5 nm, 1.0 nm, 5.0 nm, 10 nm, 25 nm, 50 nm, 75 nm, 100 nm, 150 nm, 200 nm, 250 nm, 300 nm, 400 nm, 450 nm, 500 nm, 550 nm, 600 nm, 650 nm, 700 nm, 750 nm, 800 nm, 850 nm, 900 nm, 950 nm, 1000 nm, 1250 nm, 1500 nm, 1750 nm, or 2000 nm. In a particular embodiment, the TIPs are covalently coupled to a polystyrene particle, PLGA particle, PLGA-PEMA particle, PLA particle, or other micro- or nano-particle using an ECDI linker as described in Getts et al. (Microparticles bearing encephalitogenic peptides induce T-cell tolerance and ameliorate experimental autoimmune encephalomyelitis. Nature Biotechnology 2012 (http://www.nature.com/doifinder/10.1038/nbt.2434).

[0114] In a more particular embodiment, the carrier is a PLGA, PLGA-PEMA, PLA, or carboxylated polystyrene bead of from about 1 nm to about 5000 nm, from about 10 nm to about 2000 nm, from about 100 nm to about 1000 nm, more particularly from about 400 nm to about 600 nm, and even more particularly about 500 nm. TIPs are coupled to micro- or nano-particles, for example, as follows: 12.5 mg of micro- or nano-particles and 500 ug of peptide in the presence of 10 mg/ml ECDI.

[0115] In one embodiment, the carrier is a PLGA particle modified with PEMA (poly[ethylene-co-maleic acid]) as a surfactant to form a PLGA-PEMA particle, in diameter of from 1 nm to about 5000 nm, from about 10 nm to about 2000 nm, from about 100 nm to about 1000 nm, more particularly from about 400 nm to about 600 nm, and even more particularly about 500 nm. Methods for production of PLGA-PEMA and for conjugation of PLGA-PEMA to peptides exist in the art (Hunter, Z. et al. A Biodegradable Nanoparticle Platform for the Induction of Antigen-Specific Immune Tolerance for Treatment of Autoimmune Disease. ACS Nano 140227095031005 (2014). doi:10.1021/nn405033r).

[0116] In some embodiments, the carrier can be solid or hollow and can comprise one or more layers. In some embodiments, each layer has a unique composition and unique properties relative to the other layer(s). To give but one example, the carrier may have a core/shell structure, wherein the core is one layer (e.g., a polymeric core) and the shell is a second layer (e.g., a lipid bilayer or monolayer). In some embodiments, the carrier may comprise a plurality of different layers. In some embodiments, the TIPs are incorporated into or surrounded by one or more layers.

[0117] In some embodiments, carriers may optionally comprise one or more lipids. In some embodiments, a carrier may comprise a liposome. In some embodiments, a carrier may comprise a lipid bilayer. In some embodiments, a carrier may comprise a lipid monolayer. In some embodiments, a carrier may comprise a micelle. In some embodiments, a carrier may comprise a core comprising a polymeric matrix surrounded by a lipid layer (e.g., lipid bilayer, lipid monolayer, etc.). In some embodiments, a carrier may comprise a non-polymeric core (e.g., metal particle, quantum dot, ceramic particle, bone particle, viral particle, proteins, nucleic acids, carbohydrates, etc.) surrounded by a lipid layer (e.g., lipid bilayer, lipid monolayer, etc.).

[0118] In other embodiments, carriers may comprise metal particles, quantum dots, ceramic particles, etc. In some embodiments, a non-polymeric carrier is an aggregate of non-polymeric components, such as an aggregate of metal atoms (e.g., gold atoms).

[0119] In some embodiments, carriers may optionally comprise one or more amphiphilic entities. In some embodiments, an amphiphilic entity can promote the production of carriers with increased stability, improved uniformity, or increased viscosity. In some embodiments, amphiphilic entities are associated with the interior surface of a lipid membrane (e.g., lipid bilayer, lipid monolayer, etc.). Many amphiphilic entities known in the art are suitable for use in making carriers useful in the present invention. Such amphiphilic entities include, but are not limited to, phosphoglycerides; phosphatidylcholines; dipalmitoyl phosphatidylcholine (DPPC); dioleylphosphatidyl ethanolamine (DOPE); dioleyloxypropyltriethylammonium (DOTMA); dioleoylphosphatidylcholine; cholesterol; cholesterol ester; diacylglycerol; diacylglycerolsuccinate; diphosphatidyl glycerol (DPPG); hexanedecanol; fatty alcohols such as polyethylene glycol (PEG); polyoxyethylene-9-lauryl ether; a surface active fatty acid, such as palmitic acid or oleic acid; fatty acids; fatty acid monoglycerides; fatty acid diglycerides; fatty acid amides; sorbitan trioleate (Span®85) glycocholate; sorbitan monolaurate (Span®20); polysorbate 20 (Tween®20); polysorbate 60 (Tween®60); polysorbate 65 (Tween®65); polysorbate 80 (Tween®80); polysorbate 85 (Tween®85); polyoxyethylene monostearate; surfactin; a poloxomer; a sorbitan fatty acid ester such as sorbitan trioleate; lecithin; lysolecithin; phosphatidylserine; phosphatidylinositol; sphingomyelin; phosphatidylethanolamine (cephalin); cardiolipin; phosphatidic acid; cerebrosides; dicetylphosphate; dipalmitoylphosphatidylglycerol; stearylamine; dodecylamine; hexadecyl-amine; acetyl palmitate; glycerol ricinoleate; hexadecyl sterate; isopropyl myristate; tyloxapol; poly(ethylene glycol)5000-phosphatidylethanolamine; poly(ethylene glycol)400-monostearate; phospholipids; synthetic and/or natural detergents having high surfactant properties; deoxycholates; cyclodextrins; chaotropic salts; ion pairing agents; and combinations thereof. An amphiphilic entity component may be a mixture of different amphiphilic entities. Those skilled in the art will recognize that this is an exemplary, not comprehensive, list of substances with surfactant activity. Any amphiphilic entity may be used in the production of carriers to be used in accordance with the present invention.

[0120] In some embodiments, a carrier may optionally comprise one or more carbohydrates. Carbohydrates may be natural or synthetic. A carbohydrate may be a derivatized natural carbohydrate. In certain embodiments, a carbohydrate comprises monosaccharide or disaccharide, including but not limited to glucose, fructose, galactose, ribose, lactose, sucrose, maltose, trehalose, cellbiose, mannose, xylose, arabinose, glucoronic acid, galactoronic acid, mannuronic acid, glucosamine, galatosamine, and neuramic acid. In certain embodiments, a carbohydrate is a polysaccharide, including but not limited to pullulan, cellulose, microcrystalline cellulose, hydroxypropyl methylcellulose (HPMC), hydroxycellulose (HC), methylcellulose (MC), dextran, cyclodextran, glycogen, hydroxyethylstarch, carageenan, glycon, amylose, chitosan, N,O-carboxylmethylchitosan, algin and alginic acid, starch, chitin, inulin, konjac, glucommannan, pustulan, heparin, hyaluronic acid, curdlan, and xanthan. In some embodiments, the carrier does not comprise (or specifically exclude) carbohydrates, such as a polysaccharide. In certain embodiments, the carbohydrate may comprise a carbohydrate derivative such as a sugar alcohol, including but not limited to mannitol, sorbitol, xylitol, erythritol, maltitol, and lactitol.

[0121] In some embodiments, the associated carrier can comprise one or more polymers. In some embodiments, the carrier comprises one or more polymers that are a non-methoxy-terminated, pluronic polymer. In some embodiments, at least 1%, 2%, 3%, 4%, 5%, 10%, 15%, 20%, 25%, 30%, 35%, 40%, 45%, 50%, 55%, 60%, 65%, 70%, 75%, 80%, 85%, 90%, 95%, 97%, or 99% (weight/weight) of the polymers that make up the carriers are non-methoxy-terminated, pluronic polymers. In some embodiments, all of the polymers that make up the carrier are non-methoxy-terminated, pluronic polymers. In some embodiments, the carrier comprises one or more polymers that are a non-methoxy-terminated polymer. In some embodiments, at least 1%, 2%, 3%, 4%, 5%, 10%, 15%, 20%, 25%, 30%, 35%, 40%, 45%, 50%, 55%, 60%, 65%, 70%, 75%, 80%, 85%, 90%, 95%, 97%, or 99% (weight/weight) of the polymers that make up the carriers are non-methoxy-terminated polymers. In some embodiments, all of the polymers that make up the carrier are non-methoxy-terminated polymers. In some embodiments, the carrier comprises one or more polymers that do not comprise pluronic polymer. In some embodiments, at least 1%, 2%, 3%, 4%, 5%, 10%, 15%, 20%, 25%, 30%, 35%, 40%, 45%, 50%, 55%, 60%, 65%, 70%, 75%, 80%, 85%, 90%, 95%, 97%, or 99% (weight/weight) of the polymers that make up the carrier do not comprise pluronic polymer. In some embodiments, all of the polymers that make up the carrier do not comprise pluronic polymer. In some embodiments, such a polymer are surrounded by a coating layer (e.g., liposome, lipid monolayer, micelle, etc.). In some embodiments, various elements of the carrier are coupled with the polymer.

[0122] Other examples of polymers include, but are not limited to polyethylenes, polycarbonates (e.g., poly(1,3-dioxan-2one)), polyanhydrides (e.g., poly(sebacic anhydride)), polypropylfumerates, polyamides (e.g., polycaprolactam), polyacetals, polyethers, polyesters (e.g., polylactide, polyglycolide, polylactide-co-glycolide, polycaprolactone, polyhydroxyacid (e.g., poly((β-hydroxyalkanoate))), poly(orthoesters), polycyanoacrylates, polyvinyl alcohols, polyurethanes, polyphosphazenes, polyacrylates, polymethacrylates, polyureas, polystyrenes, and polyamines, polylysine, polylysine-PEG copolymers, and poly(ethyleneimine), poly(ethylene imine)-PEG copolymers.

[0123] In some embodiments, carriers include polymers which have been approved for use in humans by the U.S. Food and Drug Administration (FDA) under 21 C.F.R. §177.2600, including but not limited to polyesters (e.g., polylactic acid, poly(lactic-co-glycolic acid), polycaprolactone, polyvalerolactone, poly(1,3-dioxan-2one)); polyanhydrides (e.g., poly(sebacic anhydride)); polyethers (e.g., polyethylene glycol); polyurethanes; polymethacrylates; polyacrylates; and polycyanoacrylates.

[0124] In some embodiments, polymers are hydrophilic. For example, polymers may comprise anionic groups (e.g., phosphate group, sulphate group, carboxylate group); cationic groups (e.g., quaternary amine group); or polar groups (e.g., hydroxyl group, thiol group, amine group). In some embodiments, a carrier comprising a hydrophilic polymeric matrix generates a hydrophilic environment within the carrier. In some embodiments, polymers are hydrophobic. In some embodiments, a carrier comprising a hydrophobic polymeric matrix generates a hydrophobic environment within the carrier. Selection of the hydrophilicity or hydrophobicity of the polymer may have an impact on the nature of materials that are incorporated (e.g., coupled) within the carrier.

[0125] In some embodiments, polymers may be modified with one or more moieties and/or functional groups. A variety of moieties or functional groups are used in accordance with the present invention. In some embodiments, polymers may be modified with polyethylene glycol (PEG), with a carbohydrate, and/or with acyclic polyacetals derived from polysaccharides (Papisov, 2001, ACS Symposium Series, 786:301). Certain embodiments may be made using the general teachings of U.S. Pat. No. 5,543,158 to Gref et al., or WO publication WO2009/051837 by Von Andrian et al.

[0126] In some embodiments, polymers may be modified with a lipid or fatty acid group. In some embodiments, a fatty acid group may be one or more of butyric, caproic, caprylic, capric, lauric, myristic, palmitic, stearic, arachidic, behenic, or lignoceric acid. In some embodiments, a fatty acid group may be one or more of palmitoleic, oleic, vaccenic, linoleic, alpha-linoleic, gamma-linoleic, arachidonic, gadoleic, arachidonic, eicosapentaenoic, docosahexaenoic, or erucic acid.

[0127] In some embodiments, polymers may be one or more acrylic polymers. In certain embodiments, acrylic polymers include, for example, acrylic acid and methacrylic acid copolymers, methyl methacrylate copolymers, ethoxyethyl methacrylates, cyanoethyl methacrylate, aminoalkyl methacrylate copolymer, poly(acrylic acid), poly(methacrylic acid), methacrylic acid alkylamide copolymer, poly(methyl methacrylate), poly(methacrylic acid anhydride), methyl methacrylate, polymethacrylate, poly(methyl methacrylate) copolymer, polyacrylamide, aminoalkyl methacrylate copolymer, glycidyl methacrylate copolymers, polycyanoacrylates, and combinations comprising one or more of the foregoing polymers. The acrylic polymer may comprise fully-polymerized copolymers of acrylic and methacrylic acid esters with a low content of quaternary ammonium groups.

[0128] In some embodiments, polymers are cationic polymers. In general, cationic polymers are able to condense and/or protect negatively charged strands of nucleic acids (e.g., DNA, or derivatives thereof). Amine-containing polymers such as poly(lysine) (Zauner et al., 1998, Adv. Drug Del. Rev., 30:97; and Kabanov et al., 1995, Bioconjugate Chem., 6:7), poly(ethylene imine) (PEI; Boussif et al., 1995, Proc. Natl. Acad. Sci., USA, 1995, 92:7297), and poly(amidoamine) dendrimers (Kukowska-Latallo et al., 1996, Proc. Natl. Acad. Sci., USA, 93:4897; Tang et al., 1996, Bioconjugate Chem., 7:703; and Haensler et al., 1993, Bioconjugate Chem., 4:372) are positively-charged at physiological pH, form ion pairs with nucleic acids, and mediate transfection in a variety of cell lines. In embodiments, the inventive carriers may not comprise (or may exclude) cationic polymers.

[0129] In some embodiments, polymers are degradable polyesters bearing cationic side chains (Putnam et al., 1999, Macromolecules, 32:3658; Barrera et al., 1993, J. Am. Chem. Soc., 115:11010; Kwon et al., 1989, Macromolecules, 22:3250; Lim et al., 1999, J. Am. Chem. Soc., 121:5633; and Zhou et al., 1990, Macromolecules, 23:3399). Examples of these polyesters include poly(L-lactide-co-L-lysine) (Barrera et al., 1993, J. Am. Chem. Soc., 115:11010), poly(serine ester) (Zhou et al., 1990, Macromolecules, 23:3399), poly(4-hydroxy-L-proline ester) (Putnam et al., 1999, Macromolecules, 32:3658; and Lim et al., 1999, J. Am. Chem. Soc., 121:5633), and poly(4-hydroxy-L-proline ester) (Putnam et al., 1999, Macromolecules, 32:3658; and Lim et al., 1999, J. Am. Chem. Soc., 121:5633).

[0130] The properties of these and other polymers and methods for preparing them are well known in the art (see, for example, U.S. Pat. Nos. 6,123,727; 5,804,178; 5,770,417; 5,736,372; 5,716,404; 6,095,148; 5,837,752; 5,902,599; 5,696,175; 5,514,378; 5,512,600; 5,399,665; 5,019,379; 5,010,167; 4,806,621; 4,638,045; and 4,946,929; Wang et al., 2001, J. Am. Chem. Soc., 123:9480; Lim et al., 2001, J. Am. Chem. Soc., 123:2460; Langer, 2000, Acc. Chem. Res., 33:94; Langer, 1999, J. Control. Release, 62:7; and Uhrich et al., 1999, Chem. Rev., 99:3181). More generally, a variety of methods for synthesizing certain suitable polymers are described in Concise Encyclopedia of Polymer Science and Polymeric Amines and Ammonium Salts, Ed. by Goethals, Pergamon Press, 1980; Principles of Polymerization by Odian, John Wiley & Sons, Fourth Edition, 2004; Contemporary Polymer Chemistry by Allcock et al., Prentice-Hall, 1981; Deming et al., 1997, Nature, 390:386; and in U.S. Pat. Nos. 6,506,577, 6,632,922, 6,686,446, and 6,818,732.

[0131] Polymers are linear or branched polymers. In some embodiments, polymers are dendrimers. In some embodiments, polymers are substantially cross-linked to one another. In some embodiments, polymers are substantially free of cross-links. In some embodiments, polymers are used in accordance with the present invention without undergoing a cross-linking step. It is further to be understood that a carrier may comprise block copolymers, graft copolymers, blends, mixtures, and/or adducts of any of the foregoing and other polymers. Those skilled in the art will recognize that the polymers listed herein represent an exemplary, not comprehensive, list of polymers that are of use in accordance with the present invention.

[0132] The TIPs of the present invention are coupled to the carrier by any of a number of methods. For example, the coupling can be a result of bonding between the TIPs and the carrier. This bonding can result in the TIP being attached to the surface of the carrier and/or contained within (encapsulated) the carrier. In some embodiments, however, the TIPs are encapsulated by the carrier as a result of the structure of the carrier rather than bonding to the carrier. In some embodiments, the carrier comprises a polymer as provided herein, and the TIPs are coupled to the carrier.

[0133] When coupling occurs as a result of bonding between the TIP and carrier, the coupling may occur via a coupling moiety. A coupling moiety can be any moiety through which TIP is bonded to a carrier. Such moieties include covalent bonds, such as an amide bond or ester bond, as well as separate molecules that bond (covalently or non-covalently) the TIP to the carrier. Such molecules include linkers or polymers or a unit thereof. For example, the coupling moiety can comprise a charged polymer to which TIP electrostatically binds. As another example, the coupling moiety can comprise a polymer or unit thereof to which it is covalently bonded.

[0134] In a particular embodiment, the TIP is coupled to the carrier using an ethylene carbodiimide (ECDI) moiety. ECDI is commercially available and TIPs are linked thereto as described, for example, in Getts et al. Microparticles bearing encephalitogenic peptides induce T-cell tolerance and ameliorate experimental autoimmune encephalomyelitis. Nature Biotechnology 2012 (http://www.nature.com/doifinder/10.1038/nbt.2434).

[0135] In certain embodiments, the coupling of the TIP to the carrier are through a covalent linker. In embodiments, TIPs are covalently coupled to the external surface via a 1,2,3-triazole linker formed by the 1,3-dipolar cycloaddition reaction of azido groups on the surface of the carrier. Such cycloaddition reactions are for example performed in the presence of a Cu(I) catalyst along with a suitable Cu(I)-ligand and a reducing agent to reduce Cu(II) compound to catalytic active Cu(I) compound. This Cu(I)-catalyzed azide-alkyne cycloaddition (CuAAC) can also be referred as the click reaction.

[0136] Additionally, the covalent coupling may comprise a covalent linker that comprises an amide linker, a disulfide linker, a thioether linker, a hydrazone linker, a hydrazide linker, an imine or oxime linker, an urea or thiourea linker, an amidine linker, an amine linker, and a sulfonamide linker.

[0137] An amide linker is formed via an amide bond between an amine on one component with the carboxylic acid group of a second component such as the carrier. The amide bond in the linker are made using any of the conventional amide bond forming reactions with suitably protected amino acids and activated carboxylic acid such N-hydroxysuccinimide-activated ester. A disulfide linker is made via the formation of a disulfide (S—S) bond between two sulfur atoms of the form, for instance, of R1-S—S—R2. A disulfide bond are formed by thiol exchange of a component containing thiol/mercaptan group (—SH) with another activated thiol group on a polymer or carrier or a carrier containing thiol/mercaptan groups with a component containing activated thiol group.

[0138] In some embodiments, a polymer containing an azide or alkyne group, terminal to the polymer chain is prepared. This polymer is then used to prepare a carrier in such a manner that a plurality of the alkyne or azide groups are positioned on the surface of that carrier. Alternatively, the carrier are prepared by another route, and subsequently functionalized with alkyne or azide groups. The TIPs are prepared with the presence of either an alkyne (if the polymer contains an azide) or an azide (if the polymer contains an alkyne) group. The TIP is then allowed to react with the carrier via the 1,3-dipolar cycloaddition reaction with or without a catalyst which covalently couples the component to the particle through the 1,4-disubstituted 1,2,3-triazole linker.

[0139] A thioether linker is made by the formation of a sulfur-carbon (thioether) bond in the form, for instance, of R1-S—R2. Thioether are made by either alkylation of a thiol/mercaptan (—SH) group on one component with an alkylating group such as halide or epoxide on a second component. Thioether linkers can also be formed by Michael addition of a thiol/mercaptan group on one component to an electron-deficient alkene group on a second component containing a maleimide group or vinyl sulfone group as the Michael acceptor. In another way, thioether linkers are prepared by the radical thiol-ene reaction of thiol/mercaptan group on one component with an alkene group on a second component.

[0140] A hydrazone linker is made by the reaction of a hydrazide group on one component with an aldehyde/ketone group on the second component.

[0141] A hydrazide linker is formed by the reaction of a hydrazine group on one component with a carboxylic acid group on the second component. Such reaction is generally performed using chemistry similar to the formation of amide bond where the carboxylic acid is activated with an activating reagent.

[0142] An imine or oxime linker is formed by the reaction of an amine or N-alkoxyamine (or aminooxy) group on one component with an aldehyde or ketone group on the second component.

[0143] An urea or thiourea linker is prepared by the reaction of an amine group on one component with an isocyanate or thioisocyanate group on the second component.

[0144] An amidine linker is prepared by the reaction of an amine group on one component with an imidoester group on the second component.

[0145] An amine linker is made by the alkylation reaction of an amine group on one component with an alkylating group such as halide, epoxide, or sulfonate ester group on the second component. Alternatively, an amine linker can also be made by reductive amination of an amine group on one component with an aldehyde or ketone group on the second component with a suitable reducing reagent such as sodium cyanoborohydride or sodium triacetoxyborohydride.

[0146] A sulfonamide linker is made by the reaction of an amine group on one component with a sulfonyl halide (such as sulfonyl chloride) group on the second component.

[0147] A sulfone linker is made by Michael addition of a nucleophile to a vinyl sulfone. Either the vinyl sulfone or the nucleophile may be on the surface of the nanocarrier or attached to a component.

[0148] The TIP can also be conjugated to the carrier via non-covalent conjugation methods. For example, a negative charged TIP are conjugated to a positive charged carrier through electrostatic adsorption.

[0149] In embodiments, the TIP are attached to a polymer, for example polylactic acid-block-polyethylene glycol, prior to the assembly of the carrier or the carrier are formed with reactive or activatable groups on its surface. In the latter case, the TIP may be prepared with a group which is compatible with the attachment chemistry that is presented by the carriers' surface. In other embodiments, a TIP are attached to VLPs or liposomes using a suitable linker. A linker is a compound or reagent that capable of coupling two molecules together. In an embodiment, the linker are a homobifunctional or heterobifunctional reagent as described in Hermanson 2008. For example, a VLP or liposome carrier containing a carboxylic group on the surface are treated with a homobifunctional linker, adipic dihydrazide (ADH), in the presence of EDC to form the corresponding carrier with the ADH linker. The resulting ADH linked carrier is then conjugated with a TIP containing an acid group via the other end of the ADH linker on NC to produce the corresponding VLP or liposome TIP conjugate.

[0150] For detailed descriptions of available conjugation methods, see Hermanson G T “Bioconjugate Techniques”, 2nd Edition Published by Academic Press, Inc., 2008. In addition to covalent attachment the component are coupled by adsorption to a pre-formed carrier or it is coupled by encapsulation during the formation of the carrier.

[0151] Carriers may be prepared using a wide variety of methods known in the art. For example, carriers are formed by methods as nanoprecipitation, flow focusing fluidic channels, spray drying, single and double emulsion solvent evaporation, solvent extraction, phase separation, milling, microemulsion procedures, microfabrication, nanofabrication, sacrificial layers, simple and complex coacervation, and other methods well known to those of ordinary skill in the art. Alternatively or additionally, aqueous and organic solvent syntheses for monodisperse semiconductor, conductive, magnetic, organic, and other nanomaterials have been described (Pellegrino et al., 2005, Small, 1:48; Murray et al., 2000, Ann. Rev. Mat. Sci., 30:545; and Trindade et al., 2001, Chem. Mat., 13:3843). Additional methods have been described in the literature (see, e.g., Doubrow, Ed., “Microcapsules and Nanoparticles in Medicine and Pharmacy,” CRC Press, Boca Raton, 1992; Mathiowitz et al., 1987, J. Control. Release, 5:13; Mathiowitz et al., 1987, Reactive Polymers, 6:275; and Mathiowitz et al., 1988, J. Appl. Polymer Sci., 35:755; U.S. Pat. Nos. 5,578,325 and 6,007,845; P. Paolicelli et al., “Surface-modified PLGA-based Nanoparticles that can Efficiently Associate and Deliver Virus-like Particles” Nanomedicine. 5(6):843-853 (2010)).

[0152] TIPs may be encapsulated into carriers as desirable using a variety of methods including but not limited to C. Astete et al., “Synthesis and characterization of PLGA nanoparticles” J. Biomater. Sci. Polymer Edn, Vol. 17, No. 3, pp. 247-289 (2006); K. Avgoustakis “Pegylated Poly(Lactide) and Poly(Lactide-Co-Glycolide) Nanoparticles: Preparation, Properties and Possible Applications in Drug Delivery” Current Drug Delivery 1:321-333 (2004); C. Reis et al., “Nanoencapsulation I. Methods for preparation of drug-loaded polymeric nanoparticles” Nanomedicine 2:8-21 (2006); P. Paolicelli et al., “Surface-modified PLGA-based Nanoparticles that can Efficiently Associate and Deliver Virus-like Particles” Nanomedicine. 5(6):843-853 (2010). Other methods suitable for encapsulating materials into carriers may be used, including without limitation methods disclosed in U.S. Pat. No. 6,632,671 to Unger Oct. 14, 2003.

[0153] In certain embodiments, carriers are prepared by a nanoprecipitation process or spray drying. Conditions used in preparing carriers may be altered to yield particles of a desired size or property (e.g., hydrophobicity, hydrophilicity, external morphology, “stickiness,” shape, etc.). The method of preparing the carriers and the conditions (e.g., solvent, temperature, concentration, air flow rate, etc.) used may depend on the materials to be coupled to the carriers and/or the composition of the polymer matrix. If particles prepared by any of the above methods have a size range outside of the desired range, particles can be sized, for example, using a sieve.

[0154] TIPs can be associated with a cocktail of immune suppressants, including but not limited to, rapamycin and IL10.

[0155] Formulations

[0156] Compositions according to the invention may further comprise pharmaceutically acceptable excipients. The compositions may be made using conventional pharmaceutical manufacturing and compounding techniques to arrive at useful dosage forms. Techniques suitable for use in practicing the present invention may be found in Handbook of Industrial Mixing: Science and Practice, Edited by Edward L. Paul, Victor A. Atiemo-Obeng, and Suzanne M. Kresta, 2004 John Wiley & Sons, Inc.; and Pharmaceutics: The Science of Dosage Form Design, 2nd Ed. Edited by M. E. Auten, 2001, Churchill Livingstone. In an embodiment, TIPs are suspended in sterile saline solution for injection together with a preservative.

[0157] The TIP compositions described herein can further comprise inorganic or organic buffers (e.g., sodium or potassium salts of phosphate, carbonate, acetate, or citrate) and pH adjustment agents (e.g., hydrochloric acid, sodium or potassium hydroxide, salts of citrate or acetate, amino acids and their salts) antioxidants (e.g., ascorbic acid, alpha-tocopherol), surfactants (e.g., polysorbate 20, polysorbate 80, polyoxyethylene9-10 nonyl phenol, sodium desoxycholate), solution and/or cryo/lyo stabilizers (e.g., sucrose, lactose, mannitol, trehalose), osmotic adjustment agents (e.g., salts or sugars), antibacterial agents (e.g., benzoic acid, phenol, gentamicin), antifoaming agents (e.g., polydimethylsilozone), preservatives (e.g., thimerosal, 2-phenoxyethanol, EDTA), polymeric stabilizers and viscosity-adjustment agents (e.g., polyvinylpyrrolidone, poloxamer 488, carboxymethylcellulose) and co-solvents (e.g., glycerol, polyethylene glycol, ethanol).

[0158] It is to be understood that the compositions of the invention are made in any suitable manner, and the invention is in no way limited to compositions that are produced using the methods described herein. Selection of an appropriate method may require attention to the properties of the particular moieties being associated.

[0159] In some embodiments, TIPs are manufactured under sterile conditions or are terminally sterilized. This can ensure that resulting compositions are sterile and non-infectious, thus improving safety when compared to non-sterile compositions. In some embodiments, TIPs may be lyophilized and stored in suspension or as lyophilized powder depending on the formulation strategy for extended periods without losing activity.

[0160] In certain embodiments, the TIPs described herein are associated with a carrier, for example coupled to a micro- or nano-particle. In certain embodiments, the amount of TIP (“load”) coupled to a carrier is based on the total weight of materials (weight/weight). Generally, the load is calculated as an average across a population of carriers, for example, microparticles. In one embodiment, the load of the TIPs on average across the population of carriers is between 0.0001% and 50%. In yet another embodiment, the load of the TIPs is between 0.01% and 20%. In a further embodiment, the load of the TIPs is between 0.1% and 10%. In still a further embodiment, the load of the TIPs is between 1% and 10%. In yet another embodiment, the load of the TIPs is at least 0.1%, at least 0.2%, at least 0.3%, at least 0.4%, at least 0.5%, at least 0.6%, at least 0.7%, at least 0.8%, at least 0.9%, at least 1%, at least 2%, at least 3%, at least 4%, at least 5%, at least 6%, at least 7%, at least 8%, at least 9%, at least 10%, at least 11%, at least 12%, at least 13%, at least 14%, at least 15%, at least 16%, at least 17%, at least 18%, at least 19% or at least 20% on average across a population of carriers. In yet a further embodiment, the load of the TIPs is 0.1%, 0.2%, 0.3%, 0.4%, 0.5%, 0.6%, 0.7%, 0.8%, 0.9%, 1%, 2%, 3%, 4%, 5%, 6%, 7%, 8%, 9%, 10%, 11%, 12%, 13%, 14%, 15%, 16%, 17%, 18%, 19% or 20% on average across a population of carriers. In some embodiments of the above embodiments, the load of the TIPs is no more than 25% on average across a population of carriers.

[0161] In general, doses of the TIP are administered based on the total TIP contained in the composition. For example, doses of TIPs can range from about 10 μg/kg to about 100,000 μg/kg. from about 20 μg/kg to about 1000 μg/kg, from about 50 μg/kg to about 500 μg/kg, from about 75 μg/kg to about 250 μg/kg. In some embodiments, the total dose of TIPs for administration are at least about 5 μg, 10 μg, 15 μg, 20 μg, 25 μg, 35 μg, 40 μg, 50 μg, 60 μg, 75 μg, 80 μg, 90 μg, 100 μg, 125 μg, 150 μg, 200 μg, 250 μg, 300 μg, 350 μg, 400 μg, 500 μg or more. In some embodiments, the doses can range from about 0.1 mg/kg to about 100 mg/kg. In still other embodiments, the doses can range from about 0.1 mg/kg to about 25 mg/kg, about 25 mg/kg to about 50 mg/kg, about 50 mg/kg to about 75 mg/kg or about 75 mg/kg to about 100 mg/kg. Alternatively, the dose is administered based on the number of carrier micro- or nano-particles that provide the desired amount of TIPs. For example, useful doses include greater than 10⁶, 10⁷, 10⁸, 10⁹ or 10¹⁰ micro- or nano-particles per dose. Other examples of useful doses include from about 1×10⁶ to about 1×10¹⁰, about 1×10⁷ to about 1×10⁹ or about 1×10⁸ to about 1×10⁹ micro- or nano-particle carriers per dose.

[0162] In one embodiment, a single dose of TIPs for administration includes at least about 15 μg of peptide.

[0163] In one embodiment, the TIPs are associated, for example bound, with a cell, for example, including but not limited to, a splenic leukocyte. In general the total dose of TIPs bound to the cell for administration is at least about 5 μg, 10 μg, 15 μg, 20 μg, 25 μg, 35 μg, 40 μg, 50 μg, 60 μg, 75 μg, 80 μg, 90 μg, 100 μg, 125 μg, 150 μg, 200 μg, 250 μg, 300 μg, 350 μg, 400 μg, 500 μg or more. Alternatively, useful doses include from about 1×10⁶ to about 1×10¹⁰, about 1×10⁷ to about 1×10⁹ or about 1×10⁸ to about 1×10⁹ cells comprising bound TIP-peptide per dose.

[0164] Induction of Immunologic Tolerance

[0165] The TIP compositions is administered to the subject through any suitable approach. The amount and timing of administration can, of course, be dependent on the subject being treated, on the sFVIII deficiency, on the presence or absence of FVIIIrp inhibitors, the FVIIIrp to which the subject will be, is, or has received and the difference between amino acid sequences in the sFVIII and FVIIIrp, on the time course of the FVIIIrp treatment, on the manner of administration, and on the judgment of the prescribing physician. Thus, because of subject to subject variability, the dosages given below are a guideline and the physician can titrate doses of the TIP compositions to achieve the tolerance that the physician considers appropriate for the subject. In considering the degree of treatment desired, the physician can balance a variety of factors such as age and weight of the subject, presence of inhibitors, as well as presence of other diseases. Pharmaceutical formulations is prepared for any desired route of administration including, but not limited to, oral, intravenous, or aerosol administration, as discussed in greater detail below.

[0166] The TIPs of the current invention are administered to a subject in order to induce a tolerogenic immune response—that is an immune response that can lead to immune suppression specific to a specific rFVIIIrp antigen or immunogenic epitope. Such a tolerogenic immune response may include any reduction, delay, or inhibition in an undesired immune response specific to the rFVIIIrp antigen or epitope. Tolerogenic immune responses, therefore, can include the prevention of or reduction in inhibitors to a specific rFVIIIrp. Tolerogenic immune responses as provided herein include immunological tolerance. The tolerogenic immune response is the result of MHC Class II-restricted presentation and/or B cell presentation, or any other presentation leading to the minimized or reduced immunicity of the rFVIIIrp.

[0167] Tolerogenic immune responses may include a reduction in FVIIIrp antigen-specific antibody (inhibitor) production. The administration of the TIPs and peptide sets described herein may result in a reduction of measurable Bethesda titer units to a FVIIIrp in a subject that already has inhibitors to a FVIIIrp. Tolerogenic immune responses also include any response that leads to the stimulation, production, or recruitment of CD4+ Treg cells and/or CD8+ Treg cells. CD4+ Treg cells can express the transcription factor FoxP3 and inhibit inflammatory responses and autoimmune inflammatory diseases (Human regulatory T cells in autoimmune diseases. Cvetanovich G L, Hafler D A. Curr Opin Immunol. 2010 December; 22(6):753-60. Regulatory T cells and autoimmunity. Vila J, Isaacs J D, Anderson A E. Curr Opin Hematol. 2009 July; 16(4):274-9). Such cells also suppress T-cell help to B-cells and induce tolerance to both self and foreign antigens (Therapeutic approaches to allergy and autoimmunity based on FoxP3+ regulatory T-cell activation and expansion. Miyara M, Wing K, Sakaguchi S. J Allergy Clin Immunol. 2009 April; 123(4):749-55). CD4+ Treg cells recognize antigen when presented by Class II proteins on APCs. CD8+ Treg cells, which recognize antigens presented by Class I (and Qa-1), can also suppress T-cell help to B-cells and result in activation of antigen-specific suppression inducing tolerance to both self and foreign antigens. Disruption of the interaction of Qa-1 with CD8+ Treg cells has been shown to dysregulate immune responses and results in the development of auto-antibody formation and an autoimmune lethal systemic-lupus-erythematosus (Kim et al., Nature. 2010 Sep. 16, 467 (7313): 328-32). CD8+ Treg cells have also been shown to inhibit models of autoimmune inflammatory diseases including rheumatoid arthritis and colitis (CD4+CD25+ regulatory T cells in autoimmune arthritis. Oh S, Rankin A L, Caton A J. Immunol. Rev. 2010 January; 233(1):97-111. Regulatory T cells in inflammatory bowel disease. Boden E K, Snapper S B. Curr Opin Gastroenterol. 2008 November; 24(6):733-41). In some embodiments, the TIP compositions provided can effectively result in both types of responses (CD4+ Treg and CD8+Treg). In other embodiments, FoxP3 is induced in other immune cells, such as macrophages, iNKT cells, etc., and the compositions provided herein can result in one or more of these responses as well.

[0168] Tolerogenic immune responses also include, but are not limited to, the induction of regulatory cytokines, such as Treg cytokines; induction of inhibitory cytokines; the inhibition of inflammatory cytokines (e.g., IL-4, IL-1, IL-5, TNF-α, IL-6, GM-CSF, IFN-γ, IL-2, IL-9, IL-12, IL-17, IL-18, IL-21, IL-22, IL-23, M-CSF, C reactive protein, acute phase protein, chemokines (e.g., MCP-1, RANTES, MIP-1α, MIP-1β, MIG, ITAC or IP-10), the production of anti-inflammatory cytokines (e.g., IL-4, IL-13, IL-10, etc.), chemokines (e.g., CCL-2, CXCL8), proteases (e.g., MMP-3, MMP-9), leukotrienes (e.g., CysLT-1, CysLT-2), prostaglandins (e.g., PGE2) or histamines; the inhibition of polarization to a Th17, Th1, or Th2 immune response; the inhibition of effector cell-specific cytokines: Th17 (e.g., IL-17, IL-25), Th1 (IFN-γ), Th2 (e.g., IL-4, IL-13); the inhibition of Th1-, Th2- or TH17-specific transcription factors; the inhibition of proliferation of effector T cells; the induction of apoptosis of effector T cells; the induction of tolerogenic dendritic cell-specific genes, the induction of FoxP3 expression, the inhibition of IgE induction or IgE-mediated immune responses; the inhibition of antibody responses (e.g., antigen-specific antibody production); the inhibition of T helper cell response; the production of TGF-β and/or IL-10; the inhibition of effector function of autoantibodies (e.g., inhibition in the depletion of cells, cell or tissue damage or complement activation); etc.

[0169] Any of the foregoing may be measured in vivo in one or more animal models or may be measured in vitro. One of ordinary skill in the art is familiar with such in vivo or in vitro measurements. Tolerogenic immune responses are monitored using, for example, methods of assessing immune cell number and/or function, tetramer analysis, ELISPOT, flow cytometry-based analysis of cytokine expression, cytokine secretion, cytokine expression profiling, gene expression profiling, protein expression profiling, analysis of cell surface markers, PCR-based detection of immune cell receptor gene usage (see T. Clay et al., “Assays for Monitoring Cellular Immune Response to Active Immunotherapy of Cancer” Clinical Cancer Research 7:1127-1135 (2001)), etc. Tolerogenic immune responses may also be monitored using, for example, methods of assessing protein levels in plasma or serum, immune cell proliferation and/or functional assays, etc. In some embodiments, tolerogenic immune responses are monitored by assessing the induction of FoxP3.

[0170] In some embodiments, the reduction of an undesired immune response or generation of a tolerogenic immune response may be assessed by determining clinical endpoints, clinical efficacy, clinical symptoms, disease biomarkers and/or clinical scores. Tolerogenic immune responses can also be assessed with diagnostic tests to assess the presence or absence of inhibitors.

[0171] In one embodiment, administration of an effective amount of TIPs may result in the prevention, reduction, or elimination of inhibitors to a FVIIIrp, and in particular a rFVIIIrp. The presence of inhibitors are assessed by determining one or more antibody titers to the FVIIIrp using techniques known in the art and include Enzyme-linked Immunosorbent Assay (ELISA), inhibition liquid phase absorption assays (ILPAAs), rocket immunoelectrophoresis (RIE) assays, and line immunoelectrophoresis (LIE) assays.

[0172] The TIP compositions of the invention are administered in effective amounts, such as the effective amounts described elsewhere herein. Doses of dosage forms contain varying amounts of TIPs or TIP sets, according to the invention. The amount of TIPs present in the inventive dosage forms are varied according to the nature and number of the TIP, the therapeutic benefit to be accomplished, and other such parameters. In embodiments, dose ranging studies are conducted to establish optimal therapeutic amount of TIPs to be present in the dosage form. In embodiments, the TIPs are present in the dosage form in an amount effective to generate a tolerogenic immune response to a FVIIIrp epitope upon administration to a subject. It may be possible to determine amounts of the TIPs effective to generate a tolerogenic immune response using conventional dose ranging studies and techniques in subjects. Dosage forms may be administered at a variety of frequencies. In one embodiment, at least one administration of the dosage form is sufficient to generate a pharmacologically relevant response. In one embodiment, at least two administrations, at least three administrations, or at least four administrations or more, of the dosage form are utilized to ensure a pharmacologically relevant response.

[0173] Prophylactic administration of the TIP compositions described herein is initiated prior to the onset of inhibitor development, or therapeutic administration is initiated after inhibitor development is established.

[0174] In some embodiments, administration of TIPs is undertaken e.g., prior to administration of the rFVIIIrp. In exemplary embodiments, TIPs are administered at one or more times including, but not limited to, 30, 25, 20, 15, 14, 13, 12, 11, 10, 9, 8, 7, 6, 5, 4, 3, 2, 1, or 0 days prior to administration of the rFVIIIrp. In addition or alternatively, TIPs are administered to a subject following administration of the rFVIIIrp. In exemplary embodiments, TIPs are administered at one or more times including, but not limited to, 1, 2, 3, 4, 5, 6, 7, 8, 9, 10, 11, 12, 13, 14, 15, 20, 25, 30, etc. days following administration of rFVIIIrp.

[0175] In some embodiments, a maintenance dose is administered to a subject after an TIP initial administration has resulted in a tolerogenic response in the subject, for example to maintain the tolerogenic effect achieved after the initial dose, to prevent an undesired immune reaction in the subject, or to prevent the subject becoming a subject at risk of experiencing an undesired immune response or an undesired level of an immune response. In some embodiments, the maintenance dose is the same dose as the initial dose the subject received. In some embodiments, the maintenance dose is a lower dose than the initial dose. For example, in some embodiments, the maintenance dose is about ¾, about ⅔, about ½, about ⅓, about ¼, about ⅛, about 1/10, about 1/20, about 1/25, about 1/50, about 1/100, about 1/1,000, about 1/10,000, about 1/100,000, or about 1/1,000,000 (weight/weight) of the initial dose.

[0176] In some aspects, methods and compositions provided herein are useful in conjunction with established means of ITI against FVIII. ITI protocols for hemophilia patients, including patients with high titer inhibitors against FVIII, are known in the art and are generally described, e.g., in Mariani et al., Thromb Haemost., 72: 155-158 (1994) and DiMichele et al., Thromb Haemost. Suppl 130 (1999). Administration of TIP composition described herein are conducted before, after, and/or concurrently with established ITI protocols and/or variations thereof. For example, in some aspects, methods provide herein increase the effectiveness of established ITI protocols (e.g., the degree and/or likelihood of successful treatment) and/or reduce associated costs or side effects. In further aspects, methods provide herein allow established ITI protocols to be beneficially modified, e.g., to decrease the frequency, duration, and/or dose of FVIII administration.

[0177] The compositions of the invention are administered by a variety of routes, including but not limited to subcutaneous, intranasal, oral, intravenous, intraperitoneal, intramuscular, transmucosal, transmucosal, sublingual, rectal, ophthalmic, pulmonary, intradermal, transdermal, transcutaneous or intradermal or by a combination of these routes. Routes of administration also include administration by inhalation or pulmonary aerosol. Techniques for preparing aerosol delivery systems are well known to those of skill in the art (see, for example, Sciarra and Cutie, “Aerosols,” in Remington's Pharmaceutical Sciences, 18th edition, 1990, pp. 1694-1712; incorporated by reference). In one embodiment, the TIPs of the present invention are administered in soluble form in the absence of adjuvant. In one embodiment, the TIPs are administered by a mucosal route. Studies have shown that peptide, when given in soluble form intraperitoneally (i.p.), intravenously (i.v.) or intranasally (i.n.) or orally can induce T cell tolerance (Anderton and Wraith (1998) as above; Liu and Wraith (1995) as above; Metzler and Wraith (1999) Immunology 97:257-263). In one embodiment, the TIP is administered intranasally.

[0178] Studies in mice have demonstrated that the duration of peptide administration required to induce tolerance depends on the precursor frequency of T cells in the recipient (Burkhart et al. (1999) as above). In many experimental studies, it has been shown that repeated doses of peptide are required to induce tolerance (Burkhart et al. (1999) as above). The exact dose and number of doses of TIP will therefore depend on the individual; however, in one embodiment a plurality of doses is administered.

[0179] If a plurality of TIPs or TIP sets is administered simultaneously, they may be in the form of a “cocktail” which is suitable for administration in single or multiple doses. Alternatively it may be given in multiple doses but vary the relative concentrations of the different TIPs between doses.

[0180] In some embodiments, the TIP compositions of the present invention are associated with, combined with, or administered with immunosuppressive compounds capable of inducing adaptive regulatory T cells. In one embodiment, the immunosuppressive compounds may include, but is not limited to, IL-10, TGF-β, and/or rapamycin and/or other limus compounds, including but not limited to biolimus A9, everolimus, tacrolimus, and zotarolimus, and/or combinations thereof. Methods for administering peptides in combination with immunosuppressive compounds are described, for example, in Nayak et al. Prevention and Reversal of Antibody Responses Against Factor IX Gene Therapy for Hemophilia B. Front Microbiol 2011; 2: 244.

[0181] In one embodiment a “dose escalation” protocol may be followed, where a plurality of doses is given to the patient in ascending concentrations. Such an approach has been used, for example, for phospholipase A2 peptides in immunotherapeutic applications against bee venom allergy (Müller et al. (1998) J. Allergy Clin Immunol. 101:747-754 and Akdis et al. (1998) J. Clin. Invest. 102:98-106).

[0182] In one aspect, the amount of TIPs to be administered may be determined using a stoichiometric calculation based on current ITI administration protocols. For example, the amount of a TIP to be administered are based on the equivalent quantity of the peptide that would be administered in a standard ITI protocol which uses the full length FVIIIrp. To determine dosing period, the subject's dendritic cells' reactivity to the TIPs is determined prior to the start of TIP administration, and then periodically monitored until tolerance to the TIPs is observed. For example, administration of the TIPs may occur over a 30 to 60 day period, wherein the subject's DC response to the TIPs are monitored (or, inhibitor concentration is monitored), and, when acceptable thresholds are reached, TIP administration ceases.

### EXAMPLES

[0183] In all examples of practicing a subject at risk of developing an anti-FVIII immune response or experiencing an anti-FVIII immune is administered one or more TIP(s) linked to a carrier.

### Example 1

### Treatment of a Subject Free of Anti-FVIII Antibodies

[0184] When a subject is in need of replacement FVIII therapy but has not yet received any replacement FVIII therapy or has received FVIII replacement but is free from anti-FVIII antibodies the following steps may be performed. One of ordinary skill in the art will appreciate that for such a subject it will be effective to administer TIPs linked to a carrier that incorporate any sequence differences between the sFVIII and rFVIIIrp (the amino acid reference locus or AARL in the context of 1-2332 possible positions for wild type FVIII).

[0185] Hemophilia Disease History and Clinical Characterization

[0186] A full hemophilia disease history of the patient is taken by a licensed physician using methods well established in the art (Robert A Zaiden, MD; Chief Editor: Steven C Dronen, MD, FAAEM. “Hemophilia A” Medscape Reference. Posting date: Dec. 23, 2013. Date material was accessed: Mar. 5, 2014. http://emedicine.medscape.com/article/779322). In addition clinical characterization of the patient's hemophilia disease is performed using laboratory tests to include measurement of hemoglobin/hematocrit, platelet count, measurement of prothrombin time, measurement of activated partial thromboplastin time (aPTT), and measurement of Factor (F)VIII activity by FVIII assay.

[0187] Sequence Patient's F8 Gene

[0188] During the development of the immune system in healthy humans, the cells and molecules of the immune system are instructed to be tolerant of self-proteins and other macromolecules that are produced endogenously, the result of which prevents the immune system from attacking self. When foreign proteins or other macromolecules are introduced into a healthy individual, the immune system recognizes these as foreign by default, as the immune system has been made tolerant only of self. Thus for many hemophilia patients, where a genetic lesion has caused the gene for FVIII to be altered in sequence, the FVIIIrp from healthy donors that is infused therapeutically may be seen as a foreign molecule. As a result the immune system mounts a response against the infused FVIIIrp, resulting in inhibitors. Importantly it is the residues or sequence of residues that differ between the patient's FVIII and the infused FVIIIrp that causes the initiation of the immune response. As a result, in order to provide therapy that leads to immune tolerance of the infused FVIIIrp, as outlined here, the sequence of the patient's FVIII gene (called F8) is compared to the sequence of the infused FVIIIrp to determine the location of residues that differ between the two. Using methods that are routine in the clinical laboratory (Viel, K. R. et al. Inhibitors of factor VIII in black patients with hemophilia. N Engl J Med 360, 1618-1627 (2009); Jacob, H. J. Next-generation sequencing for clinical diagnostics. N Engl J Med 369, 1557-1558 (2013); Yang, Y. et al. Clinical whole-exome sequencing for the diagnosis of mendelian disorders. N Engl J Med 369, 1502-1511 (2013)), the entirety of the patient's F8 gene will be sequenced. Using a routine computer software program (such as LALIGN, http://embnet.vital-it.ch/software/LALIGN_form.html) to align the sequence of the patient's F8 gene with the reference sequence from the infused FVIIIrp, four different parameters are assessed; for example (i) the causative mutation of hemophilia; (ii) the haplotype of the patient's F8 gene; (iii) other private non-synonymous single nucleotide polymorphisms (nsSNP) that are specific to the patient; (iv) differences between the patient's F8 gene and the FVIIIrp arising from engineered changes in the FVIIIrp deemed useful for facilitating expression, such as deletion of the B domain and insertion of a synthetic linker or to enhance half-life. A person of ordinary skill in the art can appreciate the numerous different computer software programs may be used for the alignment of protein sequences for the detection of differences between the patient's FVIII protein and that of FVIIIrp.

[0189] Assemble Information on Patient's F8 Mutation, Haplotype, and Private nsSNPs

[0190] The differences in protein sequence between the patient's FVIII and the FVIII replacement product were determined. These data are assembled for determining the TIPs that need to be prepared to induce immune tolerance to replacement FVIII in the patient.

[0191] Design TIPs Apropos to the Differences Between the Patient's FVIII and the FVIII Replacement Product

[0192] Using TIP design methods laid out in the detailed description above, pools of TIPs are designed for each of the protein sequence differences between the patient's FVIII and the replacement FVIII, For example, a pool of TIP of 15 amino acids in length are designed around each reference locus that arises from the difference in sequence between the patient's FVIII protein and the replacement FVIII protein. The number of TIP sequences in each pool of TIPs in this example is 15. The number of pools of TIPs equal to the number of differences in protein sequence between the patient's FVIII and the replacement FVIII.

[0193] Synthesize TIP Sets

[0194] TIPs are synthesized under good manufacturing practices (GMP). Numerous companies synthesize custom GMP-grade peptides in the range of 9-21 amino acids in length (for example AmbioPharm, Inc, http://www.ambiopharm.com). Upon transmitting to the manufacturer the sequences of TIPs required for treatment of the patient, the TIPs are synthesized and delivered.

[0195] Synthesize PLGA Nanoparticles

[0196] Numerous companies synthesize GMP-grade PLGA nanoparticles under highly defined specifications of size and surface chemistry (for example Phosphorex, Inc, http://www.phosphorex.com). Clinical-grade PLGA particles 500 nm in diameter with a surface chemistry containing carboxyl groups are obtained from a GMP-grade PLGA manufacturer.

[0197] Conjugate TIPs to PLGA Nanoparticles

[0198] Conjugating peptides such as TIPs described herein to carboxylated PLGA particles is a method well established in the art and routinely performed by persons of ordinary skill in the art (Getts, D. R. et al. Microparticles bearing encephalitogenic peptides induce T-cell tolerance and ameliorate experimental autoimmune encephalomyelitis. Nat Biotechnol 30, 1217-1224 (2012)). In the presence of EDC (1-ethyl-3-[3-dimethylaminopropyl]carbodiimide), the carboxyl moieties on the surface of carboxylated PLGA particles react to form a covalent bond with the terminal primary amine group present in all TIPs. This results in the formation of an amide bond between the PLGA particles and TIP. The TIP pool synthesized above are mixed together with the 500 nm carboxylated PLGA particles in the presence of EDC at a ratio of 0.08 mg of each TIP to 1.0 mg PLGA particles to 0.32 mg EDC in buffered aqueous solution. The coupling process is performed for each TIPs set. Following the conjugation reaction the buffered aqueous solution is exchanged a minimum of three times. It is appreciated by persons of ordinary skill in the art that other ratios of TIP to PLGA particle to EDC may be used for this procedure. It is appreciated by persons of ordinary skill in the art that PLGA particles of sizes greater than or small than 500 nm in diameter may be used for this procedure. It is appreciated by persons of ordinary skill in the art that carriers other than PLGA may be used for conjugation to TIP. It is appreciated by persons of ordinary skill in the art that chemical formulations other than EDC may be used for conjugating TIP to carriers.

[0199] Quality Control for TIP-Nanoparticle Sets

[0200] Using methods well established in the art and routinely performed by persons of ordinary skill in the art (Lutterotti, A. et al. Antigen-specific tolerance by autologous myelin peptide-coupled cells: a phase 1 trial in multiple sclerosis. Sci Transl Med 5, 188ra75 (2013)), the following quality control measures will be taken for the PLGA-TIP conjugates: (1) Verification of coupling of the TIP to PLGA particles by flow cytometry; (2) Analysis of the conjugation product to verify that residual EDC is at a concentration less than 1.9 μg/mL; (3) Analysis of the conjugation product to verify that the concentration of endotoxin is less than 0.5 endotoxin units/mL; and (4) Analysis of the conjugation product to verify that the pH is greater than or equal to 7.2 and less than or equal to 7.8.

[0201] Administer TIP-Nanoparticles to Patient by Intravenous Injection

[0202] The PLGA-TIP particles that meet the quality control parameters above are suspended in pharmaceutical grade saline to a concentration of 5×10¹⁰ particles/mL. It is appreciated by persons of ordinary skill in the art that PLGA-TIP concentrations greater than 5×10¹⁰ may be used. It is appreciated by persons of ordinary skill in the art that PLGA-TIP concentrations less than 5×10¹⁰ may be used. For each TIP set, 3.5×10¹⁰ particles per kilogram weight of the patient are injected intravenously into the patient by a licensed physician using standard clinical practices. It is appreciated by persons of ordinary skill in the art that doses greater than 3.5×10¹⁰ particles per kilogram weight of the patient may be used. It is appreciated by persons of ordinary skill in the art that doses less than 3.5×10¹⁰ particles per kilogram weight of the patient may be used.

[0203] Physical Examination and Laboratory Tests are performed after the administration of TIP nanoparticles to obtain data of blood count, chemistry panel, urinalysis, and a lipid panel.

[0204] Updated Hemophilia Disease History and Clinical Characterization

[0205] A follow-up hemophilia disease history of the patient is taken by a licensed physician. In addition clinical characterization of the patient's hemophilia disease is performed using laboratory tests to include by not limited to measurement of hemoglobin/hematocrit, platelet count, measurement of prothrombin time, measurement of activated partial thromboplastin time (aPTT), and measurement of Factor (F)VIII activity by FVIII assay.

### Example 2

### Treatment and Monitoring of Immune Response in a Subject Free of Anti-FVIII Antibodies at Onset of TIP Tolerance Induction Therapy

[0206] In the case of subject who is free of neutralizing FVIII antibodies at the onset of a tolerance induction therapy it may be useful to do all of the steps done in Example 1 and, in addition monitor the subject's immune response to putative T cell epitopes in the FVIIIrp identified by sequence analyses as described in Example 1 and the immune response to FVIIIrp

[0207] Ex Vivo T Cell Assay Using TIPs as Target Antigen

[0208] The presence and abundance of circulating effector T cells are measured in samples obtained from the patient. Antigen-specific lymphoproliferative assays are used to test for the presence in the patient's peripheral blood of T cells that recognize and respond to FVIII TIPs. Cells are labeled with the fluorescent dye 5,6-carboxyfluorescein diacetate succinimidyl ester (CFSE). Those cells that proliferate in response to antigen show a reduction in CFSE fluorescence intensity, which is measured directly by flow cytometry. Since this is a flow cytometric assay, it accurately determines the percentage of proliferating CD4+ cells, enables detailed phenotyping of T cell responses, and is more sensitive than traditional assays based on radioactive thymidine incorporation. ELISA assays are used to measure bulk secretion of cytokines produced by FVIII antigen-specific T cells derived from the patient's peripheral blood. ELISpot assays are used to enumerate the number of cytokine-secreting FVIII-specific T cells derived from the patient's peripheral blood. These assays may be repeated periodically until the subject has received 50 or more infusions on FVIIIrp

[0209] Determine Inhibitor Titer

[0210] In order to monitor the efficacy of treatment with a TIP protocol, an initial measure of the severity of the patient's FVIII inhibitor problem (if any), with subsequent measurements are taken subsequent to treatment to monitor the effect of the treatment on the patient's inhibitors. To determine the patient's titer of FVIII inhibitory antibodies, two methods are used, both of which are standard assays in medical diagnostics and are well known in the art (Peerschke, E. I. B. et al. Laboratory assessment of factor VIII inhibitor titer: the North American Specialized Coagulation Laboratory Association experience. Am J Clin Pathol 131, 552-558 (2009)). Firstly, a Bethesda assay using the Nijmegen modification is performed. This assay yields a measure of inhibitor titer in the form of Bethesda Units per milliliter of patient plasma (BU/mL). A titer of 1-5 BU/mL is considered mild for inhibitors, while a titer of >5 BU/mL is considered severe. This assay has the advantage of directly measuring the inhibition of FVIII activity by inhibitors, but has the limitation that it is less sensitive when inhibitor titers are low (0-1 BU/mL). Secondly, an enzyme-linked immunosorbant assay (ELISA) is performed. This assay measures the total amount of antibodies that are specific for FVIII in the patient's plasma, including inhibitory antibodies. This assay has the advantages of being highly sensitive, of determining the isotype of the anti-FVIII antibodies, and of measuring both inhibitory and non-inhibitory anti-FVIII antibodies. It has the limitation of not directly measuring the titer of inhibitory antibodies alone. Taken together, these two assays give a nearly complete view of the antibody immune response against FVIII.

[0211] Quantitate FVIII-Reactive B Cells by ELISpot Assay

[0212] As another parameter to measure the immune response against FVIII and the efficacy of treatment, the number of circulating FVIII-specific antibody-secreting B cells in the patient's peripheral blood are measured. The enzyme-linked immunosorbant spot (ELISpot) assay is a common immunological tool used by persons of ordinary skill in the art; which tool facilitates measurement of the number of antigen-specific B cells in peripheral blood (Czerkinsky, C. C., et al. A solid-phase enzyme-linked immunospot (ELISPOT) assay for enumeration of specific antibody-secreting cells. J Immunol Methods 65:109-121 (1983); Bondada, S. & Robertson, D. A. Assays for B lymphocyte function. Curr Protoc Immunol Chapter 3, Unit 3.8 (2003)). Using purified human FVIII as the target antigen to coat PVDF membranes of ELISpot microtiter plates, the number of B cells that secrete antibody specific for FVIII is quantitated from the buffy coat of a peripheral blood draw using established methods. This assay yields as a result the number of FVIII-specific B cells in peripheral blood, expressed in units as number of cells per milliliter of blood (#/mL). The values obtained by this assay prior to treatment are used as reference for subsequent assays that are performed post-treatment, as detailed below.

[0213] Regulatory T Cell Assay Using FVIII and/or TIPs as Target Antigen

[0214] The presence and abundance of circulating regulatory T cells are measured in samples obtained from the patient. White blood cells from the peripheral blood of patients are isolated to test for the presence and abundance of regulatory T cells specific for FVIII and/or FVIII TIPs.

### Example 3

### Treatment and Monitoring of Immune Response in a Subject with Neutralizing Anti-FVIII Antibodies at Onset of TIP Tolerance Induction Therapy

[0215] In the case of subject who has high titer neutralizing FVIII antibodies at the onset of a TIP tolerance induction therapy it may be useful to do all of the steps done in Example 1 and 2. However it would also be useful to administer TIPs that help induce tolerance any T cell in the FVIIIrp; not only those T cell epitopes that may arise when regions of the FVIIIrp that harbour an AARL are liberated by the subject's immune system.

[0216] Bioinformatics to Assist in the Design of TIPs for Tolerizing a Subject to an Array of T Cell Epitopes in FVIIIrp.

[0217] For example, Next Generation Sequencing technology is used to determine the complete set of HLA genes for a subject with an established high titer anti-FVIII immune response. Children's Hospital of Philadelphia offers this service. It is possible to use in silico methods to evaluate which peptides regions within an FVIIIrp are likely to bind the subject's MCH II proteins with adequate affinity and stability to initiate an immune response. One or more sets of such candidate T cell epitopes/peptides are evaluated in the ex vivo T cell assay described in example 2 using the peptides as target antigens. Peptides that trigger T cell proliferation are used to derive TIPs coupled to carriers for administration to the subject.

[0218] Ex Vivo T Cell Assay Using FVIIIrp as the Target Antigen

[0219] Proimmune has developed a DC-T cell assay that is useful for identifying T cell epitopes in replacement protein products such as FVIIIrp. Fully-formulated proteins are used in the assay. For example, donor PBMC are used as a source of monocytes that are cultured in defined media to generate immature dendritic cells. Dendritic cells are loaded with test antigen (whole protein), and are then induced into a more mature phenotype by further culture in defined media. CD8+ T cell-depleted donor PBMC from the same donor sample are labeled with CFSE then cultured with the antigen-primed DCs for 7 days, after which octuplicates are tested. Each DC-T cell culture includes a set of untreated control wells. The assay also incorporates reference antigen controls, comprising two potent whole protein antigens. This assay is customized to incorporate a subject's PBMCs and the replacement FVIIIrp to monitor the progress and maintenance of tolerance in a subject. Other methods may be used to monitor the presence in peripheral blood of effector T cells that are specific for FVIII as an indicia of ongoing immunity against the antigen. One expects in a patient with FVIII inhibitory antibodies that these effector T cells will be present. In contrast, in patients that have either no FVIII inhibitor antibodies or in patients that had FVIII inhibitory antibodies and have been subsequently immune tolerized to FVIII, one expects the absence or near absence of these cells in peripheral blood. As another parameter for measuring the immune response of patients against FVIII, the abundance and phenotype of these cells are measured in the peripheral blood of patients. Several methods are well established in the art and commonly employed by persons of ordinary skill in the art for measuring the abundance and phenotype of effector T cells in peripheral human blood (Clay, T. M., et al. Assays for monitoring cellular immune responses to active immunotherapy of cancer. Clin Cancer Res 7, 1127-1135 (2001); Kruisbeek, A. M., Shevach, E. & Thornton, A. M. Proliferative assays for T cell function. Curr Protoc Immunol Chapter 3, Unit 3.12 (2004); Mannering, S. I. et al. Current approaches to measuring human islet-antigen specific T cell function in type 1 diabetes. Clin Exp Immunol 162, 197-209 (2010)). Antigen-specific lymphoproliferative assays are used to test for the presence in the patient's peripheral blood of T cells that recognize and respond to FVIIIrp protein and/or to TIPs described herein. This method additionally allows the characterization of the phenotype of the T cells that respond to the FVIII antigen and/or TIPs, including but not limited to the cytokines produced by the cells, and the polarization of the T cells into T cell lineages, including but not limited to T-helper-1 cells, T-helper-2 cells, and T-helper-17 cells. ELISA assays are used to measure bulk secretion of cytokines produced by FVIII antigen-specific T cells derived from the patient's peripheral blood. ELISpot assays are used to enumerate the number of cytokine-secreting FVIII-specific T cells derived from the patient's peripheral blood

[0220] The embodiments above are intended to be illustrative and not limiting. Additional embodiments are within the claims. In addition, although the present invention has been described with reference to particular embodiments, those skilled in the art will recognize that changes can be made in form and detail without departing from the spirit and scope of the invention. Any incorporation by reference of documents above is limited such that no subject matter is incorporated that is contrary to the explicit disclosure herein.

1.-10. (canceled)

11. A method of providing a tolerance inducing peptide (TIP), the method comprising,
determining an amino acid reference locus (AARL) within a FVIII replacement product (FVIIIrp) by determining differences between protein sequences of an expression product of a subject's F8 gene (sFVIII) and the FVIIIrp, and
providing a TIP comprising the AARL of the FVIIIrp, amino acid residues upstream of the AARL corresponding with contiguous amino acid residues upstream of the AARL in the FVIIIrp and/or amino acid residues downstream from the AARL corresponding with contiguous amino acid residues downstream of the AARL FVIIIrp.

12. (canceled)

13. The method of claim 11, wherein the TIP has a length of X amino acid residues corresponding with a contiguous portion of the FVIIIrp across 2X−1 amino acids including X−1 amino acid residues upstream and X−1 amino acid residues downstream from an amino acid of the AARL within the FVIIIrp.

14. The method of claim 13, wherein providing a TIP is performed by providing a set of TIPs, with each TIP within the set of TIPs having a length of X unique amino acid residues and a first amino acid residue shifted one residue upstream in the FVIIIrp sequence with reference to the AARL and wherein the set of TIPs collectively overlaps a contiguous portion of the FVIIIrp sequence spanning a length of 2X−1 residues.

15.-16. (canceled)

17. A composition comprising a TIP prepared in accordance with the method of claim 16.

18. The composition of claim 17, wherein the TIP has a sequence selected from the group consisting of SEQ. ID No.14 to SEQ. ID No. 2438.

19. The composition of claim 17, wherein the TIP is linked to a carrier.

20. The composition of claim 19, wherein the carrier is a poly(lactide-co-glycolide)(PLGA) particle or a poly(lactide-co-glycolide)(PLGA) particle modified with PEMA (poly[ethyleneco-maleic acid]) as a surfactant as a PLGA-PEMA particle having a size of between about 10 nm to about 5000 nm.

21-38. (canceled)

39. A method of inducing tolerance to an FVIII replacement product (FVIIIrp) in a subject, the method comprising
administering to the subject at least one tolerance inducing peptide (TIP) comprising the AARL of the FVIIIrp, amino acid residues upstream of the AARL corresponding with contiguous amino acid residues upstream of the AARL in the FVIIIrp and/or amino acid residues downstream from the AARL corresponding with contiguous amino acid residues downstream of the AARL FVIIIrp
the at least one tolerance inducing peptide administered to the subject in an effective amount to induce tolerance or reduce or minimize an immune response to the FVIII replacement product.

40. The method of claim 39, wherein the administering is performed prior to the development of inhibitors to the FVIIIrp in the subject.

41. The method of claim 39, wherein the subject has inhibitors to the FVIIIrp and the administering results in at least 20% reduction of measurable Bethesda titer units to the FVIIIrp in the subject.

42. The method of claim 39, wherein the administering is performed by administering the at least one TIP in addition to other FVIII tolerance induction therapy.

43. The method of claim 39, wherein the at least one TIP induces T cell proliferation in a T cell lymphoproliferation assay.

44. The method of claim 39, further comprising detecting the subject's immune response via Bethesda or FVIII reactive B cell assay prior to the administering of and intermittently following the administering during the course of therapy.

The application's sequence listing, which the Patent Office published only in electronic form, follows.

SEQUENCE LISTING (2438 sequences)

SEQ ID NO: 1 - protein, 2332 aa, Homo sapiens
ATRRYYLGAVELSWDYMQSDLGELPVDARFPPRVPKSFPFNTSVVYKKTLFVEFTDHLFNIAKPRPPWMGLLGPTIQAEVYDTVVITLKNMASHPVSLHAVGVSYWKASEGAEYDDQTSQREKEDDKVFPGGSHTYVWQVLKENGPMASDPLCLTYSYLSHVDLVKDLNSGLIGALLVCREGSLAKEKTQTLHKFILLFAVFDEGKSWHSETKNSLMQDRDAASARAWPKMHTVNGYVNRSLPGLIGCHRKSVYWHVIGMGTTPEVHSIFLEGHTFLVRNHRQASLEISPITFLTAQTLLMDLGQFLLFCHISSHQHDGMEAYVKVDSCPEEPQLRMKNNEEAEDYDDDLTDSEMDVVRFDDDNSPSFIQIRSVAKKHPKTWVHYIAAEEEDWDYAPLVLAPDDRSYKSQYLNNGPQRIGRKYKKVRFMAYTDETFKTREAIQHESGILGPLLYGEVGDTLLIIFKNQASRPYNIYPHGITDVRPLYSRRLPKGVKHLKDFPILPGEIFKYKWTVTVEDGPTKSDPRCLTRYYSSFVNMERDLASGLIGPLLICYKESVDQRGNQIMSDKRNVILFSVFDENRSWYLTENIQRFLPNPAGVQLEDPEFQASNIMHSINGYVFDSLQLSVCLHEVAYWYILSIGAQTDFLSVFFSGYTFKHKMVYEDTLTLFPFSGETVFMSMENPGLWILGCHNSDFRNRGMTALLKVSSCDKNTGDYYEDSYEDISAYLLSKNNAIEPRSFSQNSRHPSTRQKQFNATTIPENDIEKTDPWFAHRTPMPKIQNVSSSDLLMLLRQSPTPHGLSLSDLQEAKYETFSDDPSPGAIDSNNSLSEMTHFRPQLHHSGDMVFTPESGLQLRLNEKLGTTAATELKKLDFKVSSTSNNLISTIPSDNLAAGTDNTSSLGPPSMPVHYDSQLDTTLFGKKSSPLTESGGPLSLSEENNDSKLLESGLMNSQESSWGKNVSSTESGRLFKGKRAHGPALLTKDNALFKVSISLLKTNKTSNNSATNRKTHIDGPSLLIENSPSVWQNILESDTEFKKVTPLIHDRMLMDKNATALRLNHMSNKTTSSKNMEMVQQKKEGPIPPDAQNPDMSFFKMLFLPESARWIQRTHGKNSLNSGQGPSPKQLVSLGPEKSVEGQNFLSEKNKVVVGKGEFTKDVGLKEMVFPSSRNLFLTNLDNLHENNTHNQEKKIQEEIEKKETLIQENVVLPQIHTVTGTKNFMKNLFLLSTRQNVEGSYDGAYAPVLQDFRSLNDSTNRTKKHTAHFSKKGEEENLEGLGNQTKQIVEKYACTTRISPNTSQQNFVTQRSKRALKQFRLPLEETELEKRIIVDDTSTQWSKNMKHLTPSTLTQIDYNEKEKGAITQSPLSDCLTRSHSIPQANRSPLPIAKVSSFPSIRPIYLTRVLFQDNSSHLPAASYRKKDSGVQESSHFLQGAKKNNLSLAILTLEMTGDQREVGSLGTSATNSVTYKKVENTVLPKPDLPKTSGKVELLPKVHIYQKDLFPTETSNGSPGHLDLVEGSLLQGTEGAIKWNEANRPGKVPFLRVATESSAKTPSKLLDPLAWDNHYGTQIPKEEWKSQEKSPEKTAFKKKDTILSLNACESNHAIAAINEGQNKPEIEVTWAKQGRTERLCSQNPPVLKRHQREITRTTLQSDQEEIDYDDTISVEMKKEDFDIYDEDENQSPRSFQKKTRHYFIAAVERLWDYGMSSSPHVLRNRAQSGSVPQFKKVVFQEFTDGSFTQPLYRGELNEHLGLLGPYIRAEVEDNIMVTFRNQASRPYSFYSSLISYEEDQRQGAEPRKNFVKPNETKTYFWKVQHHMAPTKDEFDCKAWAYFSDVDLEKDVHSGLIGPLLVCHTNTLNPAHGRQVTVQEFALFFTIFDETKSWYFTENMERNCRAPCNIQMEDPTFKENYRFHAINGYIMDTLPGLVMAQDQRIRWYLLSMGSNENIHSIHFSGHVFTVRKKEEYKMALYNLYPGVFETVEMLPSKAGIWRVECLIGEHLHAGMSTLFLVYSNKCQTPLGMASGHIRDFQITASGQYGQWAPKLARLHYSGSINAWSTKEPFSWIKVDLLAPMIIHGIKTQGARQKFSSLYISQFIIMYSLDGKKWQTYRGNSTGTLMVFFGNVDSSGIKHNIFNPPIIARYIRLHPTHYSIRSTLRMELMGCDLNSCSMPLGMESKAISDAQITASSYFTNMFATWSPSKARLHLQGRSNAWRPQVNNPKEWLQVDFQKTMKVTGVTTQGVKSLLTSMYVKEFLISSSQDGHQWTLFFQNGKVKVFQGNQDSFTPVVNSLDPPLLTRYLRIHPQSWVHQIALRMEVLGCEAQDLY

SEQ ID NO: 2 - protein, 40 aa, Homo sapiens
PPRVPKSFPFNTSVVYKKTLFVEFTDHLFNIAKPRPPWMG

SEQ ID NO: 3 - protein, 40 aa, Homo sapiens
PPRVPKSFPFNTSVVYKKTPFVEFTDHLFNIAKPRPPWMG

SEQ ID NO: 4 - protein, 9 aa, Homo sapiens
LFVEFTDHL

SEQ ID NO: 5 - protein, 9 aa, Homo sapiens
TLFVEFTDH

SEQ ID NO: 6 - protein, 9 aa, Homo sapiens
KTLFVEFTD

SEQ ID NO: 7 - protein, 9 aa, Homo sapiens
KKTLFVEFT

SEQ ID NO: 8 - protein, 9 aa, Homo sapiens
YKKTLFVEF

SEQ ID NO: 9 - protein, 9 aa, Homo sapiens
VYKKTLFVE

SEQ ID NO: 10 - protein, 9 aa, Homo sapiens
VVYKKTLFV

SEQ ID NO: 11 - protein, 9 aa, Homo sapiens
SVVYKKTLF

SEQ ID NO: 12 - protein, 9 aa, Homo sapiens
TSVVYKKTL

SEQ ID NO: 13 - protein, 17 aa, Homo sapiens
TSVVYKKTLFVEFTDHL

SEQ ID NO: 14 - protein, 21 aa, Homo sapiens
LFVEFTDHLFNIAKPRPPWMG

SEQ ID NO: 15 - protein, 21 aa, Homo sapiens
TLFVEFTDHLFNIAKPRPPWM

SEQ ID NO: 16 - protein, 21 aa, Homo sapiens
KTLFVEFTDHLFNIAKPRPPW

SEQ ID NO: 17 - protein, 21 aa, Homo sapiens
KKTLFVEFTDHLFNIAKPRPP

SEQ ID NO: 18 - protein, 21 aa, Homo sapiens
YKKTLFVEFTDHLFNIAKPRP

SEQ ID NO: 19 - protein, 21 aa, Homo sapiens
VYKKTLFVEFTDHLFNIAKPR

SEQ ID NO: 20 - protein, 21 aa, Homo sapiens
VVYKKTLFVEFTDHLFNIAKP

SEQ ID NO: 21 - protein, 21 aa, Homo sapiens
SVVYKKTLFVEFTDHLFNIAK

SEQ ID NO: 22 - protein, 21 aa, Homo sapiens
TSVVYKKTLFVEFTDHLFNIA

SEQ ID NO: 23 - protein, 21 aa, Homo sapiens
NTSVVYKKTLFVEFTDHLFNI

SEQ ID NO: 24 - protein, 21 aa, Homo sapiens
FNTSVVYKKTLFVEFTDHLFN

SEQ ID NO: 25 - protein, 21 aa, Homo sapiens
PFNTSVVYKKTLFVEFTDHLF

SEQ ID NO: 26 - protein, 21 aa, Homo sapiens
FPFNTSVVYKKTLFVEFTDHL

SEQ ID NO: 27 - protein, 21 aa, Homo sapiens
SFPFNTSVVYKKTLFVEFTDH

SEQ ID NO: 28 - protein, 21 aa, Homo sapiens
KSFPFNTSVVYKKTLFVEFTD

SEQ ID NO: 29 - protein, 21 aa, Homo sapiens
PKSFPFNTSVVYKKTLFVEFT

SEQ ID NO: 30 - protein, 21 aa, Homo sapiens
VPKSFPFNTSVVYKKTLFVEF

SEQ ID NO: 31 - protein, 21 aa, Homo sapiens
RVPKSFPFNTSVVYKKTLFVE

SEQ ID NO: 32 - protein, 21 aa, Homo sapiens
PRVPKSFPFNTSVVYKKTLFV

SEQ ID NO: 33 - protein, 21 aa, Homo sapiens
PPRVPKSFPFNTSVVYKKTLF

SEQ ID NO: 34 - protein, 21 aa, Homo sapiens
FPPRVPKSFPFNTSVVYKKTL

SEQ ID NO: 35 - protein, 21 aa, Homo sapiens
AEVYDTVVITLKNMASHPVSL

SEQ ID NO: 36 - protein, 21 aa, Homo sapiens
QAEVYDTVVITLKNMASHPVS

SEQ ID NO: 37 - protein, 21 aa, Homo sapiens
IQAEVYDTVVITLKNMASHPV

SEQ ID NO: 38 - protein, 21 aa, Homo sapiens
TIQAEVYDTVVITLKNMASHP

SEQ ID NO: 39 - protein, 21 aa, Homo sapiens
PTIQAEVYDTVVITLKNMASH

SEQ ID NO: 40 - protein, 21 aa, Homo sapiens
GPTIQAEVYDTVVITLKNMAS

SEQ ID NO: 41 - protein, 21 aa, Homo sapiens
LGPTIQAEVYDTVVITLKNMA

SEQ ID NO: 42 - protein, 21 aa, Homo sapiens
LLGPTIQAEVYDTVVITLKNM

SEQ ID NO: 43 - protein, 21 aa, Homo sapiens
GLLGPTIQAEVYDTVVITLKN

SEQ ID NO: 44 - protein, 21 aa, Homo sapiens
MGLLGPTIQAEVYDTVVITLK

SEQ ID NO: 45 - protein, 21 aa, Homo sapiens
WMGLLGPTIQAEVYDTVVITL

SEQ ID NO: 46 - protein, 21 aa, Homo sapiens
PWMGLLGPTIQAEVYDTVVIT

SEQ ID NO: 47 - protein, 21 aa, Homo sapiens
PPWMGLLGPTIQAEVYDTVVI

SEQ ID NO: 48 - protein, 21 aa, Homo sapiens
RPPWMGLLGPTIQAEVYDTVV

SEQ ID NO: 49 - protein, 21 aa, Homo sapiens
PRPPWMGLLGPTIQAEVYDTV

SEQ ID NO: 50 - protein, 21 aa, Homo sapiens
KPRPPWMGLLGPTIQAEVYDT

SEQ ID NO: 51 - protein, 21 aa, Homo sapiens
AKPRPPWMGLLGPTIQAEVYD

SEQ ID NO: 52 - protein, 21 aa, Homo sapiens
IAKPRPPWMGLLGPTIQAEVY

SEQ ID NO: 53 - protein, 21 aa, Homo sapiens
NIAKPRPPWMGLLGPTIQAEV

SEQ ID NO: 54 - protein, 21 aa, Homo sapiens
FNIAKPRPPWMGLLGPTIQAE

SEQ ID NO: 55 - protein, 21 aa, Homo sapiens
LFNIAKPRPPWMGLLGPTIQA

SEQ ID NO: 56 - protein, 21 aa, Homo sapiens
GVSYWKASEGAEYDDQTSQRE

SEQ ID NO: 57 - protein, 21 aa, Homo sapiens
VGVSYWKASEGAEYDDQTSQR

SEQ ID NO: 58 - protein, 21 aa, Homo sapiens
AVGVSYWKASEGAEYDDQTSQ

SEQ ID NO: 59 - protein, 21 aa, Homo sapiens
HAVGVSYWKASEGAEYDDQTS

SEQ ID NO: 60 - protein, 21 aa, Homo sapiens
LHAVGVSYWKASEGAEYDDQT

SEQ ID NO: 61 - protein, 21 aa, Homo sapiens
SLHAVGVSYWKASEGAEYDDQ

SEQ ID NO: 62 - protein, 21 aa, Homo sapiens
VSLHAVGVSYWKASEGAEYDD

SEQ ID NO: 63 - protein, 21 aa, Homo sapiens
PVSLHAVGVSYWKASEGAEYD

SEQ ID NO: 64 - protein, 21 aa, Homo sapiens
HPVSLHAVGVSYWKASEGAEY

SEQ ID NO: 65 - protein, 21 aa, Homo sapiens
SHPVSLHAVGVSYWKASEGAE

SEQ ID NO: 66 - protein, 21 aa, Homo sapiens
ASHPVSLHAVGVSYWKASEGA

SEQ ID NO: 67 - protein, 21 aa, Homo sapiens
MASHPVSLHAVGVSYWKASEG

SEQ ID NO: 68 - protein, 21 aa, Homo sapiens
NMASHPVSLHAVGVSYWKASE

SEQ ID NO: 69 - protein, 21 aa, Homo sapiens
KNMASHPVSLHAVGVSYWKAS

SEQ ID NO: 70 - protein, 21 aa, Homo sapiens
LKNMASHPVSLHAVGVSYWKA

SEQ ID NO: 71 - protein, 21 aa, Homo sapiens
TLKNMASHPVSLHAVGVSYWK

SEQ ID NO: 72 - protein, 21 aa, Homo sapiens
ITLKNMASHPVSLHAVGVSYW

SEQ ID NO: 73 - protein, 21 aa, Homo sapiens
VITLKNMASHPVSLHAVGVSY

SEQ ID NO: 74 - protein, 21 aa, Homo sapiens
VVITLKNMASHPVSLHAVGVS

SEQ ID NO: 75 - protein, 21 aa, Homo sapiens
TVVITLKNMASHPVSLHAVGV

SEQ ID NO: 76 - protein, 21 aa, Homo sapiens
DTVVITLKNMASHPVSLHAVG

SEQ ID NO: 77 - protein, 21 aa, Homo sapiens
EYDDQTSQREKEDDKVFPGGS

SEQ ID NO: 78 - protein, 21 aa, Homo sapiens
AEYDDQTSQREKEDDKVFPGG

SEQ ID NO: 79 - protein, 21 aa, Homo sapiens
GAEYDDQTSQREKEDDKVFPG

SEQ ID NO: 80 - protein, 21 aa, Homo sapiens
EGAEYDDQTSQREKEDDKVFP

SEQ ID NO: 81 - protein, 21 aa, Homo sapiens
SEGAEYDDQTSQREKEDDKVF

SEQ ID NO: 82 - protein, 21 aa, Homo sapiens
ASEGAEYDDQTSQREKEDDKV

SEQ ID NO: 83 - protein, 21 aa, Homo sapiens
KASEGAEYDDQTSQREKEDDK

SEQ ID NO: 84 - protein, 21 aa, Homo sapiens
WKASEGAEYDDQTSQREKEDD

SEQ ID NO: 85 - protein, 21 aa, Homo sapiens
YWKASEGAEYDDQTSQREKED

SEQ ID NO: 86 - protein, 21 aa, Homo sapiens
SYWKASEGAEYDDQTSQREKE

SEQ ID NO: 87 - protein, 21 aa, Homo sapiens
VSYWKASEGAEYDDQTSQREK

SEQ ID NO: 88 - protein, 21 aa, Homo sapiens
GVSYWKASEGAEYDDQTSQRE

SEQ ID NO: 89 - protein, 21 aa, Homo sapiens
VGVSYWKASEGAEYDDQTSQR

SEQ ID NO: 90 - protein, 21 aa, Homo sapiens
AVGVSYWKASEGAEYDDQTSQ

SEQ ID NO: 91 - protein, 21 aa, Homo sapiens
HAVGVSYWKASEGAEYDDQTS

SEQ ID NO: 92 - protein, 21 aa, Homo sapiens
LHAVGVSYWKASEGAEYDDQT

SEQ ID NO: 93 - protein, 21 aa, Homo sapiens
SLHAVGVSYWKASEGAEYDDQ

SEQ ID NO: 94 - protein, 21 aa, Homo sapiens
VSLHAVGVSYWKASEGAEYDD

SEQ ID NO: 95 - protein, 21 aa, Homo sapiens
PVSLHAVGVSYWKASEGAEYD

SEQ ID NO: 96 - protein, 21 aa, Homo sapiens
HPVSLHAVGVSYWKASEGAEY

SEQ ID NO: 97 - protein, 21 aa, Homo sapiens
SHPVSLHAVGVSYWKASEGAE

SEQ ID NO: 98 - protein, 21 aa, Homo sapiens
LTYSYLSHVDLVKDLNSGLIG

SEQ ID NO: 99 - protein, 21 aa, Homo sapiens
CLTYSYLSHVDLVKDLNSGLI

SEQ ID NO: 100 - protein, 21 aa, Homo sapiens
LCLTYSYLSHVDLVKDLNSGL

SEQ ID NO: 101 - protein, 21 aa, Homo sapiens
PLCLTYSYLSHVDLVKDLNSG

SEQ ID NO: 102 - protein, 21 aa, Homo sapiens
DPLCLTYSYLSHVDLVKDLNS

SEQ ID NO: 103 - protein, 21 aa, Homo sapiens
SDPLCLTYSYLSHVDLVKDLN

SEQ ID NO: 104 - protein, 21 aa, Homo sapiens
ASDPLCLTYSYLSHVDLVKDL

SEQ ID NO: 105 - protein, 21 aa, Homo sapiens
MASDPLCLTYSYLSHVDLVKD

SEQ ID NO: 106 - protein, 21 aa, Homo sapiens
PMASDPLCLTYSYLSHVDLVK

SEQ ID NO: 107 - protein, 21 aa, Homo sapiens
GPMASDPLCLTYSYLSHVDLV

SEQ ID NO: 108 - protein, 21 aa, Homo sapiens
NGPMASDPLCLTYSYLSHVDL

SEQ ID NO: 109 - protein, 21 aa, Homo sapiens
ENGPMASDPLCLTYSYLSHVD

SEQ ID NO: 110 - protein, 21 aa, Homo sapiens
KENGPMASDPLCLTYSYLSHV

SEQ ID NO: 111 - protein, 21 aa, Homo sapiens
LKENGPMASDPLCLTYSYLSH

SEQ ID NO: 112 - protein, 21 aa, Homo sapiens
VLKENGPMASDPLCLTYSYLS

SEQ ID NO: 113 - protein, 21 aa, Homo sapiens
QVLKENGPMASDPLCLTYSYL

SEQ ID NO: 114 - protein, 21 aa, Homo sapiens
WQVLKENGPMASDPLCLTYSY

SEQ ID NO: 115 - protein, 21 aa, Homo sapiens
VWQVLKENGPMASDPLCLTYS

SEQ ID NO: 116 - protein, 21 aa, Homo sapiens
YVWQVLKENGPMASDPLCLTY

SEQ ID NO: 117 - protein, 21 aa, Homo sapiens
TYVWQVLKENGPMASDPLCLT

SEQ ID NO: 118 - protein, 21 aa, Homo sapiens
HTYVWQVLKENGPMASDPLCL

SEQ ID NO: 119 - protein, 21 aa, Homo sapiens
DLVKDLNSGLIGALLVCREGS

SEQ ID NO: 120 - protein, 21 aa, Homo sapiens
VDLVKDLNSGLIGALLVCREG

SEQ ID NO: 121 - protein, 21 aa, Homo sapiens
HVDLVKDLNSGLIGALLVCRE

SEQ ID NO: 122 - protein, 21 aa, Homo sapiens
SHVDLVKDLNSGLIGALLVCR

SEQ ID NO: 123 - protein, 21 aa, Homo sapiens
LSHVDLVKDLNSGLIGALLVC

SEQ ID NO: 124 - protein, 21 aa, Homo sapiens
YLSHVDLVKDLNSGLIGALLV

SEQ ID NO: 125 - protein, 21 aa, Homo sapiens
SYLSHVDLVKDLNSGLIGALL

SEQ ID NO: 126 - protein, 21 aa, Homo sapiens
YSYLSHVDLVKDLNSGLIGAL

SEQ ID NO: 127 - protein, 21 aa, Homo sapiens
TYSYLSHVDLVKDLNSGLIGA

SEQ ID NO: 128 - protein, 21 aa, Homo sapiens
LTYSYLSHVDLVKDLNSGLIG

SEQ ID NO: 129 - protein, 21 aa, Homo sapiens
CLTYSYLSHVDLVKDLNSGLI

SEQ ID NO: 130 - protein, 21 aa, Homo sapiens
LCLTYSYLSHVDLVKDLNSGL

SEQ ID NO: 131 - protein, 21 aa, Homo sapiens
PLCLTYSYLSHVDLVKDLNSG

SEQ ID NO: 132 - protein, 21 aa, Homo sapiens
DPLCLTYSYLSHVDLVKDLNS

SEQ ID NO: 133 - protein, 21 aa, Homo sapiens
SDPLCLTYSYLSHVDLVKDLN

SEQ ID NO: 134 - protein, 21 aa, Homo sapiens
ASDPLCLTYSYLSHVDLVKDL

SEQ ID NO: 135 - protein, 21 aa, Homo sapiens
MASDPLCLTYSYLSHVDLVKD

SEQ ID NO: 136 - protein, 21 aa, Homo sapiens
PMASDPLCLTYSYLSHVDLVK

SEQ ID NO: 137 - protein, 21 aa, Homo sapiens
GPMASDPLCLTYSYLSHVDLV

SEQ ID NO: 138 - protein, 21 aa, Homo sapiens
NGPMASDPLCLTYSYLSHVDL

SEQ ID NO: 139 - protein, 21 aa, Homo sapiens
ENGPMASDPLCLTYSYLSHVD

SEQ ID NO: 140 - protein, 21 aa, Homo sapiens
LFAVFDEGKSWHSETKNSLMQ

SEQ ID NO: 141 - protein, 21 aa, Homo sapiens
LLFAVFDEGKSWHSETKNSLM

SEQ ID NO: 142 - protein, 21 aa, Homo sapiens
ILLFAVFDEGKSWHSETKNSL

SEQ ID NO: 143 - protein, 21 aa, Homo sapiens
FILLFAVFDEGKSWHSETKNS

SEQ ID NO: 144 - protein, 21 aa, Homo sapiens
KFILLFAVFDEGKSWHSETKN

SEQ ID NO: 145 - protein, 21 aa, Homo sapiens
HKFILLFAVFDEGKSWHSETK

SEQ ID NO: 146 - protein, 21 aa, Homo sapiens
LHKFILLFAVFDEGKSWHSET

SEQ ID NO: 147 - protein, 21 aa, Homo sapiens
TLHKFILLFAVFDEGKSWHSE

SEQ ID NO: 148 - protein, 21 aa, Homo sapiens
QTLHKFILLFAVFDEGKSWHS

SEQ ID NO: 149 - protein, 21 aa, Homo sapiens
TQTLHKFILLFAVFDEGKSWH

SEQ ID NO: 150 - protein, 21 aa, Homo sapiens
KTQTLHKFILLFAVFDEGKSW

SEQ ID NO: 151 - protein, 21 aa, Homo sapiens
EKTQTLHKFILLFAVFDEGKS

SEQ ID NO: 152 - protein, 21 aa, Homo sapiens
KEKTQTLHKFILLFAVFDEGK

SEQ ID NO: 153 - protein, 21 aa, Homo sapiens
AKEKTQTLHKFILLFAVFDEG

SEQ ID NO: 154 - protein, 21 aa, Homo sapiens
LAKEKTQTLHKFILLFAVFDE

SEQ ID NO: 155 - protein, 21 aa, Homo sapiens
SLAKEKTQTLHKFILLFAVFD

SEQ ID NO: 156 - protein, 21 aa, Homo sapiens
GSLAKEKTQTLHKFILLFAVF

SEQ ID NO: 157 - protein, 21 aa, Homo sapiens
EGSLAKEKTQTLHKFILLFAV

SEQ ID NO: 158 - protein, 21 aa, Homo sapiens
REGSLAKEKTQTLHKFILLFA

SEQ ID NO: 159 - protein, 21 aa, Homo sapiens
CREGSLAKEKTQTLHKFILLF

SEQ ID NO: 160 - protein, 21 aa, Homo sapiens
VCREGSLAKEKTQTLHKFILL

SEQ ID NO: 161 - protein, 21 aa, Homo sapiens
EGKSWHSETKNSLMQDRDAAS

SEQ ID NO: 162 - protein, 21 aa, Homo sapiens
DEGKSWHSETKNSLMQDRDAA

SEQ ID NO: 163 - protein, 21 aa, Homo sapiens
FDEGKSWHSETKNSLMQDRDA

SEQ ID NO: 164 - protein, 21 aa, Homo sapiens
VFDEGKSWHSETKNSLMQDRD

SEQ ID NO: 165 - protein, 21 aa, Homo sapiens
AVFDEGKSWHSETKNSLMQDR

SEQ ID NO: 166 - protein, 21 aa, Homo sapiens
FAVFDEGKSWHSETKNSLMQD

SEQ ID NO: 167 - protein, 21 aa, Homo sapiens
LFAVFDEGKSWHSETKNSLMQ

SEQ ID NO: 168 - protein, 21 aa, Homo sapiens
LLFAVFDEGKSWHSETKNSLM

SEQ ID NO: 169 - protein, 21 aa, Homo sapiens
ILLFAVFDEGKSWHSETKNSL

SEQ ID NO: 170 - protein, 21 aa, Homo sapiens
FILLFAVFDEGKSWHSETKNS

SEQ ID NO: 171 - protein, 21 aa, Homo sapiens
KFILLFAVFDEGKSWHSETKN

SEQ ID NO: 172 - protein, 21 aa, Homo sapiens
HKFILLFAVFDEGKSWHSETK

SEQ ID NO: 173 - protein, 21 aa, Homo sapiens
LHKFILLFAVFDEGKSWHSET

SEQ ID NO: 174 - protein, 21 aa, Homo sapiens
TLHKFILLFAVFDEGKSWHSE

SEQ ID NO: 175 - protein, 21 aa, Homo sapiens
QTLHKFILLFAVFDEGKSWHS

SEQ ID NO: 176 - protein, 21 aa, Homo sapiens
TQTLHKFILLFAVFDEGKSWH

SEQ ID NO: 177 - protein, 21 aa, Homo sapiens
KTQTLHKFILLFAVFDEGKSW

SEQ ID NO: 178 - protein, 21 aa, Homo sapiens
EKTQTLHKFILLFAVFDEGKS

SEQ ID NO: 179 - protein, 21 aa, Homo sapiens
KEKTQTLHKFILLFAVFDEGK

SEQ ID NO: 180 - protein, 21 aa, Homo sapiens
AKEKTQTLHKFILLFAVFDEG

SEQ ID NO: 181 - protein, 21 aa, Homo sapiens
LAKEKTQTLHKFILLFAVFDE

SEQ ID NO: 182 - protein, 21 aa, Homo sapiens
HSIFLEGHTFLVRNHRQASLE

SEQ ID NO: 183 - protein, 21 aa, Homo sapiens
VHSIFLEGHTFLVRNHRQASL

SEQ ID NO: 184 - protein, 21 aa, Homo sapiens
EVHSIFLEGHTFLVRNHRQAS

SEQ ID NO: 185 - protein, 21 aa, Homo sapiens
PEVHSIFLEGHTFLVRNHRQA

SEQ ID NO: 186 - protein, 21 aa, Homo sapiens
TPEVHSIFLEGHTFLVRNHRQ

SEQ ID NO: 187 - protein, 21 aa, Homo sapiens
TTPEVHSIFLEGHTFLVRNHR

SEQ ID NO: 188 - protein, 21 aa, Homo sapiens
GTTPEVHSIFLEGHTFLVRNH

SEQ ID NO: 189 - protein, 21 aa, Homo sapiens
MGTTPEVHSIFLEGHTFLVRN

SEQ ID NO: 190 - protein, 21 aa, Homo sapiens
GMGTTPEVHSIFLEGHTFLVR

SEQ ID NO: 191 - protein, 21 aa, Homo sapiens
IGMGTTPEVHSIFLEGHTFLV

SEQ ID NO: 192 - protein, 21 aa, Homo sapiens
VIGMGTTPEVHSIFLEGHTFL

SEQ ID NO: 193 - protein, 21 aa, Homo sapiens
HVIGMGTTPEVHSIFLEGHTF

SEQ ID NO: 194 - protein, 21 aa, Homo sapiens
WHVIGMGTTPEVHSIFLEGHT

SEQ ID NO: 195 - protein, 21 aa, Homo sapiens
YWHVIGMGTTPEVHSIFLEGH

SEQ ID NO: 196 - protein, 21 aa, Homo sapiens
VYWHVIGMGTTPEVHSIFLEG

SEQ ID NO: 197 - protein, 21 aa, Homo sapiens
SVYWHVIGMGTTPEVHSIFLE

SEQ ID NO: 198 - protein, 21 aa, Homo sapiens
KSVYWHVIGMGTTPEVHSIFL

SEQ ID NO: 199 - protein, 21 aa, Homo sapiens
RKSVYWHVIGMGTTPEVHSIF

SEQ ID NO: 200 - protein, 21 aa, Homo sapiens
HRKSVYWHVIGMGTTPEVHSI

SEQ ID NO: 201 - protein, 21 aa, Homo sapiens
CHRKSVYWHVIGMGTTPEVHS

SEQ ID NO: 202 - protein, 21 aa, Homo sapiens
GCHRKSVYWHVIGMGTTPEVH

SEQ ID NO: 203 - protein, 21 aa, Homo sapiens
FLVRNHRQASLEISPITFLTA

SEQ ID NO: 204 - protein, 21 aa, Homo sapiens
TFLVRNHRQASLEISPITFLT

SEQ ID NO: 205 - protein, 21 aa, Homo sapiens
HTFLVRNHRQASLEISPITFL

SEQ ID NO: 206 - protein, 21 aa, Homo sapiens
GHTFLVRNHRQASLEISPITF

SEQ ID NO: 207 - protein, 21 aa, Homo sapiens
EGHTFLVRNHRQASLEISPIT

SEQ ID NO: 208 - protein, 21 aa, Homo sapiens
LEGHTFLVRNHRQASLEISPI

SEQ ID NO: 209 - protein, 21 aa, Homo sapiens
FLEGHTFLVRNHRQASLEISP

SEQ ID NO: 210 - protein, 21 aa, Homo sapiens
IFLEGHTFLVRNHRQASLEIS

SEQ ID NO: 211 - protein, 21 aa, Homo sapiens
SIFLEGHTFLVRNHRQASLEI

SEQ ID NO: 212 - protein, 21 aa, Homo sapiens
HSIFLEGHTFLVRNHRQASLE

SEQ ID NO: 213 - protein, 21 aa, Homo sapiens
VHSIFLEGHTFLVRNHRQASL

SEQ ID NO: 214 - protein, 21 aa, Homo sapiens
EVHSIFLEGHTFLVRNHRQAS

SEQ ID NO: 215 - protein, 21 aa, Homo sapiens
PEVHSIFLEGHTFLVRNHRQA

SEQ ID NO: 216 - protein, 21 aa, Homo sapiens
TPEVHSIFLEGHTFLVRNHRQ

SEQ ID NO: 217 - protein, 21 aa, Homo sapiens
TTPEVHSIFLEGHTFLVRNHR

SEQ ID NO: 218 - protein, 21 aa, Homo sapiens
GTTPEVHSIFLEGHTFLVRNH

SEQ ID NO: 219 - protein, 21 aa, Homo sapiens
MGTTPEVHSIFLEGHTFLVRN

SEQ ID NO: 220 - protein, 21 aa, Homo sapiens
GMGTTPEVHSIFLEGHTFLVR

SEQ ID NO: 221 - protein, 21 aa, Homo sapiens
IGMGTTPEVHSIFLEGHTFLV

SEQ ID NO: 222 - protein, 21 aa, Homo sapiens
VIGMGTTPEVHSIFLEGHTFL

SEQ ID NO: 223 - protein, 21 aa, Homo sapiens
VIGMGTTPEVHSIFLEGHTFL

SEQ ID NO: 224 - protein, 21 aa, Homo sapiens
LVRNHRQASLEISPITFLTAQ

SEQ ID NO: 225 - protein, 21 aa, Homo sapiens
FLVRNHRQASLEISPITFLTA

SEQ ID NO: 226 - protein, 21 aa, Homo sapiens
TFLVRNHRQASLEISPITFLT

SEQ ID NO: 227 - protein, 21 aa, Homo sapiens
HTFLVRNHRQASLEISPITFL

SEQ ID NO: 228 - protein, 21 aa, Homo sapiens
GHTFLVRNHRQASLEISPITF

SEQ ID NO: 229 - protein, 21 aa, Homo sapiens
EGHTFLVRNHRQASLEISPIT

SEQ ID NO: 230 - protein, 21 aa, Homo sapiens
LEGHTFLVRNHRQASLEISPI

SEQ ID NO: 231 - protein, 21 aa, Homo sapiens
FLEGHTFLVRNHRQASLEISP

SEQ ID NO: 232 - protein, 21 aa, Homo sapiens
IFLEGHTFLVRNHRQASLEIS

SEQ ID NO: 233 - protein, 21 aa, Homo sapiens
SIFLEGHTFLVRNHRQASLEI

SEQ ID NO: 234 - protein, 21 aa, Homo sapiens
HSIFLEGHTFLVRNHRQASLE

SEQ ID NO: 235 - protein, 21 aa, Homo sapiens
VHSIFLEGHTFLVRNHRQASL

SEQ ID NO: 236 - protein, 21 aa, Homo sapiens
EVHSIFLEGHTFLVRNHRQAS

SEQ ID NO: 237 - protein, 21 aa, Homo sapiens
PEVHSIFLEGHTFLVRNHRQA

SEQ ID NO: 238 - protein, 21 aa, Homo sapiens
TPEVHSIFLEGHTFLVRNHRQ

SEQ ID NO: 239 - protein, 21 aa, Homo sapiens
TTPEVHSIFLEGHTFLVRNHR

SEQ ID NO: 240 - protein, 21 aa, Homo sapiens
GTTPEVHSIFLEGHTFLVRNH

SEQ ID NO: 241 - protein, 21 aa, Homo sapiens
MGTTPEVHSIFLEGHTFLVRN

SEQ ID NO: 242 - protein, 21 aa, Homo sapiens
GMGTTPEVHSIFLEGHTFLVR

SEQ ID NO: 243 - protein, 21 aa, Homo sapiens
IGMGTTPEVHSIFLEGHTFLV

SEQ ID NO: 244 - protein, 21 aa, Homo sapiens
VIGMGTTPEVHSIFLEGHTFL

SEQ ID NO: 245 - protein, 21 aa, Homo sapiens
CHISSHQHDGMEAYVKVDSCP

SEQ ID NO: 246 - protein, 21 aa, Homo sapiens
FCHISSHQHDGMEAYVKVDSC

SEQ ID NO: 247 - protein, 21 aa, Homo sapiens
LFCHISSHQHDGMEAYVKVDS

SEQ ID NO: 248 - protein, 21 aa, Homo sapiens
LLFCHISSHQHDGMEAYVKVD

SEQ ID NO: 249 - protein, 21 aa, Homo sapiens
FLLFCHISSHQHDGMEAYVKV

SEQ ID NO: 250 - protein, 21 aa, Homo sapiens
QFLLFCHISSHQHDGMEAYVK

SEQ ID NO: 251 - protein, 21 aa, Homo sapiens
GQFLLFCHISSHQHDGMEAYV

SEQ ID NO: 252 - protein, 21 aa, Homo sapiens
LGQFLLFCHISSHQHDGMEAY

SEQ ID NO: 253 - protein, 21 aa, Homo sapiens
DLGQFLLFCHISSHQHDGMEA

SEQ ID NO: 254 - protein, 21 aa, Homo sapiens
MDLGQFLLFCHISSHQHDGME

SEQ ID NO: 255 - protein, 21 aa, Homo sapiens
LMDLGQFLLFCHISSHQHDGM

SEQ ID NO: 256 - protein, 21 aa, Homo sapiens
LLMDLGQFLLFCHISSHQHDG

SEQ ID NO: 257 - protein, 21 aa, Homo sapiens
TLLMDLGQFLLFCHISSHQHD

SEQ ID NO: 258 - protein, 21 aa, Homo sapiens
QTLLMDLGQFLLFCHISSHQH

SEQ ID NO: 259 - protein, 21 aa, Homo sapiens
AQTLLMDLGQFLLFCHISSHQ

SEQ ID NO: 260 - protein, 21 aa, Homo sapiens
TAQTLLMDLGQFLLFCHISSH

SEQ ID NO: 261 - protein, 21 aa, Homo sapiens
LTAQTLLMDLGQFLLFCHISS

SEQ ID NO: 262 - protein, 21 aa, Homo sapiens
FLTAQTLLMDLGQFLLFCHIS

SEQ ID NO: 263 - protein, 21 aa, Homo sapiens
TFLTAQTLLMDLGQFLLFCHI

SEQ ID NO: 264 - protein, 21 aa, Homo sapiens
ITFLTAQTLLMDLGQFLLFCH

SEQ ID NO: 265 - protein, 21 aa, Homo sapiens
PITFLTAQTLLMDLGQFLLFC

SEQ ID NO: 266 - protein, 21 aa, Homo sapiens
KHPKTWVHYIAAEEEDWDYAP

SEQ ID NO: 267 - protein, 21 aa, Homo sapiens
KKHPKTWVHYIAAEEEDWDYA

SEQ ID NO: 268 - protein, 21 aa, Homo sapiens
AKKHPKTWVHYIAAEEEDWDY

SEQ ID NO: 269 - protein, 21 aa, Homo sapiens
VAKKHPKTWVHYIAAEEEDWD

SEQ ID NO: 270 - protein, 21 aa, Homo sapiens
SVAKKHPKTWVHYIAAEEEDW

SEQ ID NO: 271 - protein, 21 aa, Homo sapiens
RSVAKKHPKTWVHYIAAEEED

SEQ ID NO: 272 - protein, 21 aa, Homo sapiens
IRSVAKKHPKTWVHYIAAEEE

SEQ ID NO: 273 - protein, 21 aa, Homo sapiens
QIRSVAKKHPKTWVHYIAAEE

SEQ ID NO: 274 - protein, 21 aa, Homo sapiens
IQIRSVAKKHPKTWVHYIAAE

SEQ ID NO: 275 - protein, 21 aa, Homo sapiens
FIQIRSVAKKHPKTWVHYIAA

SEQ ID NO: 276 - protein, 21 aa, Homo sapiens
SFIQIRSVAKKHPKTWVHYIA

SEQ ID NO: 277 - protein, 21 aa, Homo sapiens
PSFIQIRSVAKKHPKTWVHYI

SEQ ID NO: 278 - protein, 21 aa, Homo sapiens
SPSFIQIRSVAKKHPKTWVHY

SEQ ID NO: 279 - protein, 21 aa, Homo sapiens
NSPSFIQIRSVAKKHPKTWVH

SEQ ID NO: 280 - protein, 21 aa, Homo sapiens
DNSPSFIQIRSVAKKHPKTWV

SEQ ID NO: 281 - protein, 21 aa, Homo sapiens
DDNSPSFIQIRSVAKKHPKTW

SEQ ID NO: 282 - protein, 21 aa, Homo sapiens
DDDNSPSFIQIRSVAKKHPKT

SEQ ID NO: 283 - protein, 21 aa, Homo sapiens
FDDDNSPSFIQIRSVAKKHPK

SEQ ID NO: 284 - protein, 21 aa, Homo sapiens
RFDDDNSPSFIQIRSVAKKHP

SEQ ID NO: 285 - protein, 21 aa, Homo sapiens
VRFDDDNSPSFIQIRSVAKKH

SEQ ID NO: 286 - protein, 21 aa, Homo sapiens
VVRFDDDNSPSFIQIRSVAKK

SEQ ID NO: 287 - protein, 21 aa, Homo sapiens
HYIAAEEEDWDYAPLVLAPDD

SEQ ID NO: 288 - protein, 21 aa, Homo sapiens
VHYIAAEEEDWDYAPLVLAPD

SEQ ID NO: 289 - protein, 21 aa, Homo sapiens
WVHYIAAEEEDWDYAPLVLAP

SEQ ID NO: 290 - protein, 21 aa, Homo sapiens
TWVHYIAAEEEDWDYAPLVLA

SEQ ID NO: 291 - protein, 21 aa, Homo sapiens
KTWVHYIAAEEEDWDYAPLVL

SEQ ID NO: 292 - protein, 21 aa, Homo sapiens
PKTWVHYIAAEEEDWDYAPLV

SEQ ID NO: 293 - protein, 21 aa, Homo sapiens
HPKTWVHYIAAEEEDWDYAPL

SEQ ID NO: 294 - protein, 21 aa, Homo sapiens
KHPKTWVHYIAAEEEDWDYAP

SEQ ID NO: 295 - protein, 21 aa, Homo sapiens
KKHPKTWVHYIAAEEEDWDYA

SEQ ID NO: 296 - protein, 21 aa, Homo sapiens
AKKHPKTWVHYIAAEEEDWDY

SEQ ID NO: 297 - protein, 21 aa, Homo sapiens
VAKKHPKTWVHYIAAEEEDWD

SEQ ID NO: 298 - protein, 21 aa, Homo sapiens
SVAKKHPKTWVHYIAAEEEDW

SEQ ID NO: 299 - protein, 21 aa, Homo sapiens
RSVAKKHPKTWVHYIAAEEED

SEQ ID NO: 300 - protein, 21 aa, Homo sapiens
IRSVAKKHPKTWVHYIAAEEE

SEQ ID NO: 301 - protein, 21 aa, Homo sapiens
QIRSVAKKHPKTWVHYIAAEE

SEQ ID NO: 302 - protein, 21 aa, Homo sapiens
IQIRSVAKKHPKTWVHYIAAE

SEQ ID NO: 303 - protein, 21 aa, Homo sapiens
FIQIRSVAKKHPKTWVHYIAA

SEQ ID NO: 304 - protein, 21 aa, Homo sapiens
SFIQIRSVAKKHPKTWVHYIA

SEQ ID NO: 305 - protein, 21 aa, Homo sapiens
PSFIQIRSVAKKHPKTWVHYI

SEQ ID NO: 306 - protein, 21 aa, Homo sapiens
SPSFIQIRSVAKKHPKTWVHY

SEQ ID NO: 307 - protein, 21 aa, Homo sapiens
NSPSFIQIRSVAKKHPKTWVH

SEQ ID NO: 308 - protein, 21 aa, Homo sapiens
WDYAPLVLAPDDRSYKSQYLN

SEQ ID NO: 309 - protein, 21 aa, Homo sapiens
DWDYAPLVLAPDDRSYKSQYL

SEQ ID NO: 310 - protein, 21 aa, Homo sapiens
EDWDYAPLVLAPDDRSYKSQY

SEQ ID NO: 311 - protein, 21 aa, Homo sapiens
EEDWDYAPLVLAPDDRSYKSQ

SEQ ID NO: 312 - protein, 21 aa, Homo sapiens
EEEDWDYAPLVLAPDDRSYKS

SEQ ID NO: 313 - protein, 21 aa, Homo sapiens
AEEEDWDYAPLVLAPDDRSYK

SEQ ID NO: 314 - protein, 21 aa, Homo sapiens
AAEEEDWDYAPLVLAPDDRSY

SEQ ID NO: 315 - protein, 21 aa, Homo sapiens
IAAEEEDWDYAPLVLAPDDRS

SEQ ID NO: 316 - protein, 21 aa, Homo sapiens
YIAAEEEDWDYAPLVLAPDDR

SEQ ID NO: 317 - protein, 21 aa, Homo sapiens
HYIAAEEEDWDYAPLVLAPDD

SEQ ID NO: 318 - protein, 21 aa, Homo sapiens
VHYIAAEEEDWDYAPLVLAPD

SEQ ID NO: 319 - protein, 21 aa, Homo sapiens
WVHYIAAEEEDWDYAPLVLAP

SEQ ID NO: 320 - protein, 21 aa, Homo sapiens
TWVHYIAAEEEDWDYAPLVLA

SEQ ID NO: 321 - protein, 21 aa, Homo sapiens
KTWVHYIAAEEEDWDYAPLVL

SEQ ID NO: 322 - protein, 21 aa, Homo sapiens
PKTWVHYIAAEEEDWDYAPLV

SEQ ID NO: 323 - protein, 21 aa, Homo sapiens
HPKTWVHYIAAEEEDWDYAPL

SEQ ID NO: 324 - protein, 21 aa, Homo sapiens
KHPKTWVHYIAAEEEDWDYAP

SEQ ID NO: 325 - protein, 21 aa, Homo sapiens
KKHPKTWVHYIAAEEEDWDYA

SEQ ID NO: 326 - protein, 21 aa, Homo sapiens
AKKHPKTWVHYIAAEEEDWDY

SEQ ID NO: 327 - protein, 21 aa, Homo sapiens
VAKKHPKTWVHYIAAEEEDWD

SEQ ID NO: 328 - protein, 21 aa, Homo sapiens
SVAKKHPKTWVHYIAAEEEDW

SEQ ID NO: 329 - protein, 21 aa, Homo sapiens
APLVLAPDDRSYKSQYLNNGP

SEQ ID NO: 330 - protein, 21 aa, Homo sapiens
YAPLVLAPDDRSYKSQYLNNG

SEQ ID NO: 331 - protein, 21 aa, Homo sapiens
DYAPLVLAPDDRSYKSQYLNN

SEQ ID NO: 332 - protein, 21 aa, Homo sapiens
WDYAPLVLAPDDRSYKSQYLN

SEQ ID NO: 333 - protein, 21 aa, Homo sapiens
DWDYAPLVLAPDDRSYKSQYL

SEQ ID NO: 334 - protein, 21 aa, Homo sapiens
EDWDYAPLVLAPDDRSYKSQY

SEQ ID NO: 335 - protein, 21 aa, Homo sapiens
EEDWDYAPLVLAPDDRSYKSQ

SEQ ID NO: 336 - protein, 21 aa, Homo sapiens
EEEDWDYAPLVLAPDDRSYKS

SEQ ID NO: 337 - protein, 21 aa, Homo sapiens
AEEEDWDYAPLVLAPDDRSYK

SEQ ID NO: 338 - protein, 21 aa, Homo sapiens
AAEEEDWDYAPLVLAPDDRSY

SEQ ID NO: 339 - protein, 21 aa, Homo sapiens
IAAEEEDWDYAPLVLAPDDRS

SEQ ID NO: 340 - protein, 21 aa, Homo sapiens
YIAAEEEDWDYAPLVLAPDDR

SEQ ID NO: 341 - protein, 21 aa, Homo sapiens
HYIAAEEEDWDYAPLVLAPDD

SEQ ID NO: 342 - protein, 21 aa, Homo sapiens
VHYIAAEEEDWDYAPLVLAPD

SEQ ID NO: 343 - protein, 21 aa, Homo sapiens
WVHYIAAEEEDWDYAPLVLAP

SEQ ID NO: 344 - protein, 21 aa, Homo sapiens
TWVHYIAAEEEDWDYAPLVLA

SEQ ID NO: 345 - protein, 21 aa, Homo sapiens
KTWVHYIAAEEEDWDYAPLVL

SEQ ID NO: 346 - protein, 21 aa, Homo sapiens
PKTWVHYIAAEEEDWDYAPLV

SEQ ID NO: 347 - protein, 21 aa, Homo sapiens
HPKTWVHYIAAEEEDWDYAPL

SEQ ID NO: 348 - protein, 21 aa, Homo sapiens
KHPKTWVHYIAAEEEDWDYAP

SEQ ID NO: 349 - protein, 21 aa, Homo sapiens
KKHPKTWVHYIAAEEEDWDYA

SEQ ID NO: 350 - protein, 21 aa, Homo sapiens
RSYKSQYLNNGPQRIGRKYKK

SEQ ID NO: 351 - protein, 21 aa, Homo sapiens
DRSYKSQYLNNGPQRIGRKYK

SEQ ID NO: 352 - protein, 21 aa, Homo sapiens
DDRSYKSQYLNNGPQRIGRKY

SEQ ID NO: 353 - protein, 21 aa, Homo sapiens
PDDRSYKSQYLNNGPQRIGRK

SEQ ID NO: 354 - protein, 21 aa, Homo sapiens
APDDRSYKSQYLNNGPQRIGR

SEQ ID NO: 355 - protein, 21 aa, Homo sapiens
LAPDDRSYKSQYLNNGPQRIG

SEQ ID NO: 356 - protein, 21 aa, Homo sapiens
VLAPDDRSYKSQYLNNGPQRI

SEQ ID NO: 357 - protein, 21 aa, Homo sapiens
LVLAPDDRSYKSQYLNNGPQR

SEQ ID NO: 358 - protein, 21 aa, Homo sapiens
PLVLAPDDRSYKSQYLNNGPQ

SEQ ID NO: 359 - protein, 21 aa, Homo sapiens
APLVLAPDDRSYKSQYLNNGP

SEQ ID NO: 360 - protein, 21 aa, Homo sapiens
YAPLVLAPDDRSYKSQYLNNG

SEQ ID NO: 361 - protein, 21 aa, Homo sapiens
DYAPLVLAPDDRSYKSQYLNN

SEQ ID NO: 362 - protein, 21 aa, Homo sapiens
WDYAPLVLAPDDRSYKSQYLN

SEQ ID NO: 363 - protein, 21 aa, Homo sapiens
DWDYAPLVLAPDDRSYKSQYL

SEQ ID NO: 364 - protein, 21 aa, Homo sapiens
EDWDYAPLVLAPDDRSYKSQY

SEQ ID NO: 365 - protein, 21 aa, Homo sapiens
EEDWDYAPLVLAPDDRSYKSQ

SEQ ID NO: 366 - protein, 21 aa, Homo sapiens
EEEDWDYAPLVLAPDDRSYKS

SEQ ID NO: 367 - protein, 21 aa, Homo sapiens
AEEEDWDYAPLVLAPDDRSYK

SEQ ID NO: 368 - protein, 21 aa, Homo sapiens
AAEEEDWDYAPLVLAPDDRSY

SEQ ID NO: 369 - protein, 21 aa, Homo sapiens
IAAEEEDWDYAPLVLAPDDRS

SEQ ID NO: 370 - protein, 21 aa, Homo sapiens
YIAAEEEDWDYAPLVLAPDDR

SEQ ID NO: 371 - protein, 21 aa, Homo sapiens
GRKYKKVRFMAYTDETFKTRE

SEQ ID NO: 372 - protein, 21 aa, Homo sapiens
IGRKYKKVRFMAYTDETFKTR

SEQ ID NO: 373 - protein, 21 aa, Homo sapiens
RIGRKYKKVRFMAYTDETFKT

SEQ ID NO: 374 - protein, 21 aa, Homo sapiens
QRIGRKYKKVRFMAYTDETFK

SEQ ID NO: 375 - protein, 21 aa, Homo sapiens
PQRIGRKYKKVRFMAYTDETF

SEQ ID NO: 376 - protein, 21 aa, Homo sapiens
GPQRIGRKYKKVRFMAYTDET

SEQ ID NO: 377 - protein, 21 aa, Homo sapiens
NGPQRIGRKYKKVRFMAYTDE

SEQ ID NO: 378 - protein, 21 aa, Homo sapiens
NNGPQRIGRKYKKVRFMAYTD

SEQ ID NO: 379 - protein, 21 aa, Homo sapiens
LNNGPQRIGRKYKKVRFMAYT

SEQ ID NO: 380 - protein, 21 aa, Homo sapiens
YLNNGPQRIGRKYKKVRFMAY

SEQ ID NO: 381 - protein, 21 aa, Homo sapiens
QYLNNGPQRIGRKYKKVRFMA

SEQ ID NO: 382 - protein, 21 aa, Homo sapiens
SQYLNNGPQRIGRKYKKVRFM

SEQ ID NO: 383 - protein, 21 aa, Homo sapiens
KSQYLNNGPQRIGRKYKKVRF

SEQ ID NO: 384 - protein, 21 aa, Homo sapiens
YKSQYLNNGPQRIGRKYKKVR

SEQ ID NO: 385 - protein, 21 aa, Homo sapiens
SYKSQYLNNGPQRIGRKYKKV

SEQ ID NO: 386 - protein, 21 aa, Homo sapiens
RSYKSQYLNNGPQRIGRKYKK

SEQ ID NO: 387 - protein, 21 aa, Homo sapiens
DRSYKSQYLNNGPQRIGRKYK

SEQ ID NO: 388 - protein, 21 aa, Homo sapiens
DDRSYKSQYLNNGPQRIGRKY

SEQ ID NO: 389 - protein, 21 aa, Homo sapiens
PDDRSYKSQYLNNGPQRIGRK

SEQ ID NO: 390 - protein, 21 aa, Homo sapiens
APDDRSYKSQYLNNGPQRIGR

SEQ ID NO: 391 - protein, 21 aa, Homo sapiens
LAPDDRSYKSQYLNNGPQRIG

SEQ ID NO: 392 - protein, 21 aa, Homo sapiens
REAIQHESGILGPLLYGEVGD

SEQ ID NO: 393 - protein, 21 aa, Homo sapiens
TREAIQHESGILGPLLYGEVG

SEQ ID NO: 394 - protein, 21 aa, Homo sapiens
KTREAIQHESGILGPLLYGEV

SEQ ID NO: 395 - protein, 21 aa, Homo sapiens
FKTREAIQHESGILGPLLYGE

SEQ ID NO: 396 - protein, 21 aa, Homo sapiens
TFKTREAIQHESGILGPLLYG

SEQ ID NO: 397 - protein, 21 aa, Homo sapiens
ETFKTREAIQHESGILGPLLY

SEQ ID NO: 398 - protein, 21 aa, Homo sapiens
DETFKTREAIQHESGILGPLL

SEQ ID NO: 399 - protein, 21 aa, Homo sapiens
TDETFKTREAIQHESGILGPL

SEQ ID NO: 400 - protein, 21 aa, Homo sapiens
YTDETFKTREAIQHESGILGP

SEQ ID NO: 401 - protein, 21 aa, Homo sapiens
AYTDETFKTREAIQHESGILG

SEQ ID NO: 402 - protein, 21 aa, Homo sapiens
MAYTDETFKTREAIQHESGIL

SEQ ID NO: 403 - protein, 21 aa, Homo sapiens
FMAYTDETFKTREAIQHESGI

SEQ ID NO: 404 - protein, 21 aa, Homo sapiens
RFMAYTDETFKTREAIQHESG

SEQ ID NO: 405 - protein, 21 aa, Homo sapiens
VRFMAYTDETFKTREAIQHES

SEQ ID NO: 406 - protein, 21 aa, Homo sapiens
KVRFMAYTDETFKTREAIQHE

SEQ ID NO: 407 - protein, 21 aa, Homo sapiens
KKVRFMAYTDETFKTREAIQH

SEQ ID NO: 408 - protein, 21 aa, Homo sapiens
YKKVRFMAYTDETFKTREAIQ

SEQ ID NO: 409 - protein, 21 aa, Homo sapiens
KYKKVRFMAYTDETFKTREAI

SEQ ID NO: 410 - protein, 21 aa, Homo sapiens
RKYKKVRFMAYTDETFKTREA

SEQ ID NO: 411 - protein, 21 aa, Homo sapiens
GRKYKKVRFMAYTDETFKTRE

SEQ ID NO: 412 - protein, 21 aa, Homo sapiens
IGRKYKKVRFMAYTDETFKTR

SEQ ID NO: 413 - protein, 21 aa, Homo sapiens
PLLYGEVGDTLLIIFKNQASR

SEQ ID NO: 414 - protein, 21 aa, Homo sapiens
GPLLYGEVGDTLLIIFKNQAS

SEQ ID NO: 415 - protein, 21 aa, Homo sapiens
LGPLLYGEVGDTLLIIFKNQA

SEQ ID NO: 416 - protein, 21 aa, Homo sapiens
ILGPLLYGEVGDTLLIIFKNQ

SEQ ID NO: 417 - protein, 21 aa, Homo sapiens
GILGPLLYGEVGDTLLIIFKN

SEQ ID NO: 418 - protein, 21 aa, Homo sapiens
SGILGPLLYGEVGDTLLIIFK

SEQ ID NO: 419 - protein, 21 aa, Homo sapiens
ESGILGPLLYGEVGDTLLIIF

SEQ ID NO: 420 - protein, 21 aa, Homo sapiens
HESGILGPLLYGEVGDTLLII

SEQ ID NO: 421 - protein, 21 aa, Homo sapiens
QHESGILGPLLYGEVGDTLLI

SEQ ID NO: 422 - protein, 21 aa, Homo sapiens
IQHESGILGPLLYGEVGDTLL

SEQ ID NO: 423 - protein, 21 aa, Homo sapiens
AIQHESGILGPLLYGEVGDTL

SEQ ID NO: 424 - protein, 21 aa, Homo sapiens
EAIQHESGILGPLLYGEVGDT

SEQ ID NO: 425 - protein, 21 aa, Homo sapiens
REAIQHESGILGPLLYGEVGD

SEQ ID NO: 426 - protein, 21 aa, Homo sapiens
TREAIQHESGILGPLLYGEVG

SEQ ID NO: 427 - protein, 21 aa, Homo sapiens
KTREAIQHESGILGPLLYGEV

SEQ ID NO: 428 - protein, 21 aa, Homo sapiens
FKTREAIQHESGILGPLLYGE

SEQ ID NO: 429 - protein, 21 aa, Homo sapiens
TFKTREAIQHESGILGPLLYG

SEQ ID NO: 430 - protein, 21 aa, Homo sapiens
ETFKTREAIQHESGILGPLLY

SEQ ID NO: 431 - protein, 21 aa, Homo sapiens
DETFKTREAIQHESGILGPLL

SEQ ID NO: 432 - protein, 21 aa, Homo sapiens
TDETFKTREAIQHESGILGPL

SEQ ID NO: 433 - protein, 21 aa, Homo sapiens
YTDETFKTREAIQHESGILGP

SEQ ID NO: 434 - protein, 21 aa, Homo sapiens
GEVGDTLLIIFKNQASRPYNI

SEQ ID NO: 435 - protein, 21 aa, Homo sapiens
YGEVGDTLLIIFKNQASRPYN

SEQ ID NO: 436 - protein, 21 aa, Homo sapiens
LYGEVGDTLLIIFKNQASRPY

SEQ ID NO: 437 - protein, 21 aa, Homo sapiens
LLYGEVGDTLLIIFKNQASRP

SEQ ID NO: 438 - protein, 21 aa, Homo sapiens
PLLYGEVGDTLLIIFKNQASR

SEQ ID NO: 439 - protein, 21 aa, Homo sapiens
GPLLYGEVGDTLLIIFKNQAS

SEQ ID NO: 440 - protein, 21 aa, Homo sapiens
LGPLLYGEVGDTLLIIFKNQA

SEQ ID NO: 441 - protein, 21 aa, Homo sapiens
ILGPLLYGEVGDTLLIIFKNQ

SEQ ID NO: 442 - protein, 21 aa, Homo sapiens
GILGPLLYGEVGDTLLIIFKN

SEQ ID NO: 443 - protein, 21 aa, Homo sapiens
SGILGPLLYGEVGDTLLIIFK

SEQ ID NO: 444 - protein, 21 aa, Homo sapiens
ESGILGPLLYGEVGDTLLIIF

SEQ ID NO: 445 - protein, 21 aa, Homo sapiens
HESGILGPLLYGEVGDTLLII

SEQ ID NO: 446 - protein, 21 aa, Homo sapiens
QHESGILGPLLYGEVGDTLLI

SEQ ID NO: 447 - protein, 21 aa, Homo sapiens
IQHESGILGPLLYGEVGDTLL

SEQ ID NO: 448 - protein, 21 aa, Homo sapiens
AIQHESGILGPLLYGEVGDTL

SEQ ID NO: 449 - protein, 21 aa, Homo sapiens
EAIQHESGILGPLLYGEVGDT

SEQ ID NO: 450 - protein, 21 aa, Homo sapiens
REAIQHESGILGPLLYGEVGD

SEQ ID NO: 451 - protein, 21 aa, Homo sapiens
TREAIQHESGILGPLLYGEVG

SEQ ID NO: 452 - protein, 21 aa, Homo sapiens
KTREAIQHESGILGPLLYGEV

SEQ ID NO: 453 - protein, 21 aa, Homo sapiens
FKTREAIQHESGILGPLLYGE

SEQ ID NO: 454 - protein, 21 aa, Homo sapiens
TFKTREAIQHESGILGPLLYG

SEQ ID NO: 455 - protein, 21 aa, Homo sapiens
GITDVRPLYSRRLPKGVKHLK

SEQ ID NO: 456 - protein, 21 aa, Homo sapiens
HGITDVRPLYSRRLPKGVKHL

SEQ ID NO: 457 - protein, 21 aa, Homo sapiens
PHGITDVRPLYSRRLPKGVKH

SEQ ID NO: 458 - protein, 21 aa, Homo sapiens
YPHGITDVRPLYSRRLPKGVK

SEQ ID NO: 459 - protein, 21 aa, Homo sapiens
IYPHGITDVRPLYSRRLPKGV

SEQ ID NO: 460 - protein, 21 aa, Homo sapiens
NIYPHGITDVRPLYSRRLPKG

SEQ ID NO: 461 - protein, 21 aa, Homo sapiens
YNIYPHGITDVRPLYSRRLPK

SEQ ID NO: 462 - protein, 21 aa, Homo sapiens
PYNIYPHGITDVRPLYSRRLP

SEQ ID NO: 463 - protein, 21 aa, Homo sapiens
RPYNIYPHGITDVRPLYSRRL

SEQ ID NO: 464 - protein, 21 aa, Homo sapiens
SRPYNIYPHGITDVRPLYSRR

SEQ ID NO: 465 - protein, 21 aa, Homo sapiens
ASRPYNIYPHGITDVRPLYSR

SEQ ID NO: 466 - protein, 21 aa, Homo sapiens
QASRPYNIYPHGITDVRPLYS

SEQ ID NO: 467 - protein, 21 aa, Homo sapiens
NQASRPYNIYPHGITDVRPLY

SEQ ID NO: 468 - protein, 21 aa, Homo sapiens
KNQASRPYNIYPHGITDVRPL

SEQ ID NO: 469 - protein, 21 aa, Homo sapiens
FKNQASRPYNIYPHGITDVRP

SEQ ID NO: 470 - protein, 21 aa, Homo sapiens
IFKNQASRPYNIYPHGITDVR

SEQ ID NO: 471 - protein, 21 aa, Homo sapiens
IIFKNQASRPYNIYPHGITDV

SEQ ID NO: 472 - protein, 21 aa, Homo sapiens
LIIFKNQASRPYNIYPHGITD

SEQ ID NO: 473 - protein, 21 aa, Homo sapiens
LLIIFKNQASRPYNIYPHGIT

SEQ ID NO: 474 - protein, 21 aa, Homo sapiens
TLLIIFKNQASRPYNIYPHGI

SEQ ID NO: 475 - protein, 21 aa, Homo sapiens
DTLLIIFKNQASRPYNIYPHG

SEQ ID NO: 476 - protein, 21 aa, Homo sapiens
GVKHLKDFPILPGEIFKYKWT

SEQ ID NO: 477 - protein, 21 aa, Homo sapiens
KGVKHLKDFPILPGEIFKYKW

SEQ ID NO: 478 - protein, 21 aa, Homo sapiens
PKGVKHLKDFPILPGEIFKYK

SEQ ID NO: 479 - protein, 21 aa, Homo sapiens
LPKGVKHLKDFPILPGEIFKY

SEQ ID NO: 480 - protein, 21 aa, Homo sapiens
RLPKGVKHLKDFPILPGEIFK

SEQ ID NO: 481 - protein, 21 aa, Homo sapiens
RRLPKGVKHLKDFPILPGEIF

SEQ ID NO: 482 - protein, 21 aa, Homo sapiens
SRRLPKGVKHLKDFPILPGEI

SEQ ID NO: 483 - protein, 21 aa, Homo sapiens
YSRRLPKGVKHLKDFPILPGE

SEQ ID NO: 484 - protein, 21 aa, Homo sapiens
LYSRRLPKGVKHLKDFPILPG

SEQ ID NO: 485 - protein, 21 aa, Homo sapiens
PLYSRRLPKGVKHLKDFPILP

SEQ ID NO: 486 - protein, 21 aa, Homo sapiens
RPLYSRRLPKGVKHLKDFPIL

SEQ ID NO: 487 - protein, 21 aa, Homo sapiens
VRPLYSRRLPKGVKHLKDFPI

SEQ ID NO: 488 - protein, 21 aa, Homo sapiens
DVRPLYSRRLPKGVKHLKDFP

SEQ ID NO: 489 - protein, 21 aa, Homo sapiens
TDVRPLYSRRLPKGVKHLKDF

SEQ ID NO: 490 - protein, 21 aa, Homo sapiens
ITDVRPLYSRRLPKGVKHLKD

SEQ ID NO: 491 - protein, 21 aa, Homo sapiens
GITDVRPLYSRRLPKGVKHLK

SEQ ID NO: 492 - protein, 21 aa, Homo sapiens
HGITDVRPLYSRRLPKGVKHL

SEQ ID NO: 493 - protein, 21 aa, Homo sapiens
PHGITDVRPLYSRRLPKGVKH

SEQ ID NO: 494 - protein, 21 aa, Homo sapiens
YPHGITDVRPLYSRRLPKGVK

SEQ ID NO: 495 - protein, 21 aa, Homo sapiens
IYPHGITDVRPLYSRRLPKGV

SEQ ID NO: 496 - protein, 21 aa, Homo sapiens
NIYPHGITDVRPLYSRRLPKG

SEQ ID NO: 497 - protein, 21 aa, Homo sapiens
RYYSSFVNMERDLASGLIGPL

SEQ ID NO: 498 - protein, 21 aa, Homo sapiens
TRYYSSFVNMERDLASGLIGP

SEQ ID NO: 499 - protein, 21 aa, Homo sapiens
LTRYYSSFVNMERDLASGLIG

SEQ ID NO: 500 - protein, 21 aa, Homo sapiens
CLTRYYSSFVNMERDLASGLI

SEQ ID NO: 501 - protein, 21 aa, Homo sapiens
RCLTRYYSSFVNMERDLASGL

SEQ ID NO: 502 - protein, 21 aa, Homo sapiens
PRCLTRYYSSFVNMERDLASG

SEQ ID NO: 503 - protein, 21 aa, Homo sapiens
DPRCLTRYYSSFVNMERDLAS

SEQ ID NO: 504 - protein, 21 aa, Homo sapiens
SDPRCLTRYYSSFVNMERDLA

SEQ ID NO: 505 - protein, 21 aa, Homo sapiens
KSDPRCLTRYYSSFVNMERDL

SEQ ID NO: 506 - protein, 21 aa, Homo sapiens
TKSDPRCLTRYYSSFVNMERD

SEQ ID NO: 507 - protein, 21 aa, Homo sapiens
PTKSDPRCLTRYYSSFVNMER

SEQ ID NO: 508 - protein, 21 aa, Homo sapiens
GPTKSDPRCLTRYYSSFVNME

SEQ ID NO: 509 - protein, 21 aa, Homo sapiens
DGPTKSDPRCLTRYYSSFVNM

SEQ ID NO: 510 - protein, 21 aa, Homo sapiens
EDGPTKSDPRCLTRYYSSFVN

SEQ ID NO: 511 - protein, 21 aa, Homo sapiens
VEDGPTKSDPRCLTRYYSSFV

SEQ ID NO: 512 - protein, 21 aa, Homo sapiens
TVEDGPTKSDPRCLTRYYSSF

SEQ ID NO: 513 - protein, 21 aa, Homo sapiens
VTVEDGPTKSDPRCLTRYYSS

SEQ ID NO: 514 - protein, 21 aa, Homo sapiens
TVTVEDGPTKSDPRCLTRYYS

SEQ ID NO: 515 - protein, 21 aa, Homo sapiens
WTVTVEDGPTKSDPRCLTRYY

SEQ ID NO: 516 - protein, 21 aa, Homo sapiens
KWTVTVEDGPTKSDPRCLTRY

SEQ ID NO: 517 - protein, 21 aa, Homo sapiens
YKWTVTVEDGPTKSDPRCLTR

SEQ ID NO: 518 - protein, 21 aa, Homo sapiens
RYYSSFVNMERDLASGLIGPL

SEQ ID NO: 519 - protein, 21 aa, Homo sapiens
TRYYSSFVNMERDLASGLIGP

SEQ ID NO: 520 - protein, 21 aa, Homo sapiens
LTRYYSSFVNMERDLASGLIG

SEQ ID NO: 521 - protein, 21 aa, Homo sapiens
CLTRYYSSFVNMERDLASGLI

SEQ ID NO: 522 - protein, 21 aa, Homo sapiens
RCLTRYYSSFVNMERDLASGL

SEQ ID NO: 523 - protein, 21 aa, Homo sapiens
PRCLTRYYSSFVNMERDLASG

SEQ ID NO: 524 - protein, 21 aa, Homo sapiens
DPRCLTRYYSSFVNMERDLAS

SEQ ID NO: 525 - protein, 21 aa, Homo sapiens
SDPRCLTRYYSSFVNMERDLA

SEQ ID NO: 526 - protein, 21 aa, Homo sapiens
KSDPRCLTRYYSSFVNMERDL

SEQ ID NO: 527 - protein, 21 aa, Homo sapiens
TKSDPRCLTRYYSSFVNMERD

SEQ ID NO: 528 - protein, 21 aa, Homo sapiens
PTKSDPRCLTRYYSSFVNMER

SEQ ID NO: 529 - protein, 21 aa, Homo sapiens
GPTKSDPRCLTRYYSSFVNME

SEQ ID NO: 530 - protein, 21 aa, Homo sapiens
DGPTKSDPRCLTRYYSSFVNM

SEQ ID NO: 531 - protein, 21 aa, Homo sapiens
EDGPTKSDPRCLTRYYSSFVN

SEQ ID NO: 532 - protein, 21 aa, Homo sapiens
VEDGPTKSDPRCLTRYYSSFV

SEQ ID NO: 533 - protein, 21 aa, Homo sapiens
TVEDGPTKSDPRCLTRYYSSF

SEQ ID NO: 534 - protein, 21 aa, Homo sapiens
VTVEDGPTKSDPRCLTRYYSS

SEQ ID NO: 535 - protein, 21 aa, Homo sapiens
TVTVEDGPTKSDPRCLTRYYS

SEQ ID NO: 536 - protein, 21 aa, Homo sapiens
WTVTVEDGPTKSDPRCLTRYY

SEQ ID NO: 537 - protein, 21 aa, Homo sapiens
KWTVTVEDGPTKSDPRCLTRY

SEQ ID NO: 538 - protein, 21 aa, Homo sapiens
YKWTVTVEDGPTKSDPRCLTR

SEQ ID NO: 539 - protein, 21 aa, Homo sapiens
SSFVNMERDLASGLIGPLLIC

SEQ ID NO: 540 - protein, 21 aa, Homo sapiens
YSSFVNMERDLASGLIGPLLI

SEQ ID NO: 541 - protein, 21 aa, Homo sapiens
YYSSFVNMERDLASGLIGPLL

SEQ ID NO: 542 - protein, 21 aa, Homo sapiens
RYYSSFVNMERDLASGLIGPL

SEQ ID NO: 543 - protein, 21 aa, Homo sapiens
TRYYSSFVNMERDLASGLIGP

SEQ ID NO: 544 - protein, 21 aa, Homo sapiens
LTRYYSSFVNMERDLASGLIG

SEQ ID NO: 545 - protein, 21 aa, Homo sapiens
CLTRYYSSFVNMERDLASGLI

SEQ ID NO: 546 - protein, 21 aa, Homo sapiens
RCLTRYYSSFVNMERDLASGL

SEQ ID NO: 547 - protein, 21 aa, Homo sapiens
PRCLTRYYSSFVNMERDLASG

SEQ ID NO: 548 - protein, 21 aa, Homo sapiens
DPRCLTRYYSSFVNMERDLAS

SEQ ID NO: 549 - protein, 21 aa, Homo sapiens
SDPRCLTRYYSSFVNMERDLA

SEQ ID NO: 550 - protein, 21 aa, Homo sapiens
KSDPRCLTRYYSSFVNMERDL

SEQ ID NO: 551 - protein, 21 aa, Homo sapiens
TKSDPRCLTRYYSSFVNMERD

SEQ ID NO: 552 - protein, 21 aa, Homo sapiens
PTKSDPRCLTRYYSSFVNMER

SEQ ID NO: 553 - protein, 21 aa, Homo sapiens
GPTKSDPRCLTRYYSSFVNME

SEQ ID NO: 554 - protein, 21 aa, Homo sapiens
DGPTKSDPRCLTRYYSSFVNM

SEQ ID NO: 555 - protein, 21 aa, Homo sapiens
EDGPTKSDPRCLTRYYSSFVN

SEQ ID NO: 556 - protein, 21 aa, Homo sapiens
VEDGPTKSDPRCLTRYYSSFV

SEQ ID NO: 557 - protein, 21 aa, Homo sapiens
TVEDGPTKSDPRCLTRYYSSF

SEQ ID NO: 558 - protein, 21 aa, Homo sapiens
VTVEDGPTKSDPRCLTRYYSS

SEQ ID NO: 559 - protein, 21 aa, Homo sapiens
TVTVEDGPTKSDPRCLTRYYS

SEQ ID NO: 560 - protein, 21 aa, Homo sapiens
SSFVNMERDLASGLIGPLLIC

SEQ ID NO: 561 - protein, 21 aa, Homo sapiens
YSSFVNMERDLASGLIGPLLI

SEQ ID NO: 562 - protein, 21 aa, Homo sapiens
YYSSFVNMERDLASGLIGPLL

SEQ ID NO: 563 - protein, 21 aa, Homo sapiens
RYYSSFVNMERDLASGLIGPL

SEQ ID NO: 564 - protein, 21 aa, Homo sapiens
TRYYSSFVNMERDLASGLIGP

SEQ ID NO: 565 - protein, 21 aa, Homo sapiens
LTRYYSSFVNMERDLASGLIG

SEQ ID NO: 566 - protein, 21 aa, Homo sapiens
CLTRYYSSFVNMERDLASGLI

SEQ ID NO: 567 - protein, 21 aa, Homo sapiens
RCLTRYYSSFVNMERDLASGL

SEQ ID NO: 568 - protein, 21 aa, Homo sapiens
PRCLTRYYSSFVNMERDLASG

SEQ ID NO: 569 - protein, 21 aa, Homo sapiens
DPRCLTRYYSSFVNMERDLAS

SEQ ID NO: 570 - protein, 21 aa, Homo sapiens
SDPRCLTRYYSSFVNMERDLA

SEQ ID NO: 571 - protein, 21 aa, Homo sapiens
KSDPRCLTRYYSSFVNMERDL

SEQ ID NO: 572 - protein, 21 aa, Homo sapiens
TKSDPRCLTRYYSSFVNMERD

SEQ ID NO: 573 - protein, 21 aa, Homo sapiens
PTKSDPRCLTRYYSSFVNMER

SEQ ID NO: 574 - protein, 21 aa, Homo sapiens
GPTKSDPRCLTRYYSSFVNME

SEQ ID NO: 575 - protein, 21 aa, Homo sapiens
DGPTKSDPRCLTRYYSSFVNM

SEQ ID NO: 576 - protein, 21 aa, Homo sapiens
EDGPTKSDPRCLTRYYSSFVN

SEQ ID NO: 577 - protein, 21 aa, Homo sapiens
VEDGPTKSDPRCLTRYYSSFV

SEQ ID NO: 578 - protein, 21 aa, Homo sapiens
TVEDGPTKSDPRCLTRYYSSF

SEQ ID NO: 579 - protein, 21 aa, Homo sapiens
VTVEDGPTKSDPRCLTRYYSS

SEQ ID NO: 580 - protein, 21 aa, Homo sapiens
TVTVEDGPTKSDPRCLTRYYS

SEQ ID NO: 581 - protein, 21 aa, Homo sapiens
SFVNMERDLASGLIGPLLICY

SEQ ID NO: 582 - protein, 21 aa, Homo sapiens
SSFVNMERDLASGLIGPLLIC

SEQ ID NO: 583 - protein, 21 aa, Homo sapiens
YSSFVNMERDLASGLIGPLLI

SEQ ID NO: 584 - protein, 21 aa, Homo sapiens
YYSSFVNMERDLASGLIGPLL

SEQ ID NO: 585 - protein, 21 aa, Homo sapiens
RYYSSFVNMERDLASGLIGPL

SEQ ID NO: 586 - protein, 21 aa, Homo sapiens
TRYYSSFVNMERDLASGLIGP

SEQ ID NO: 587 - protein, 21 aa, Homo sapiens
LTRYYSSFVNMERDLASGLIG

SEQ ID NO: 588 - protein, 21 aa, Homo sapiens
CLTRYYSSFVNMERDLASGLI

SEQ ID NO: 589 - protein, 21 aa, Homo sapiens
RCLTRYYSSFVNMERDLASGL

SEQ ID NO: 590 - protein, 21 aa, Homo sapiens
PRCLTRYYSSFVNMERDLASG

SEQ ID NO: 591 - protein, 21 aa, Homo sapiens
DPRCLTRYYSSFVNMERDLAS

SEQ ID NO: 592 - protein, 21 aa, Homo sapiens
SDPRCLTRYYSSFVNMERDLA

SEQ ID NO: 593 - protein, 21 aa, Homo sapiens
KSDPRCLTRYYSSFVNMERDL

SEQ ID NO: 594 - protein, 21 aa, Homo sapiens
TKSDPRCLTRYYSSFVNMERD

SEQ ID NO: 595 - protein, 21 aa, Homo sapiens
PTKSDPRCLTRYYSSFVNMER

SEQ ID NO: 596 - protein, 21 aa, Homo sapiens
GPTKSDPRCLTRYYSSFVNME

SEQ ID NO: 597 - protein, 21 aa, Homo sapiens
DGPTKSDPRCLTRYYSSFVNM

SEQ ID NO: 598 - protein, 21 aa, Homo sapiens
EDGPTKSDPRCLTRYYSSFVN

SEQ ID NO: 599 - protein, 21 aa, Homo sapiens
VEDGPTKSDPRCLTRYYSSFV

SEQ ID NO: 600 - protein, 21 aa, Homo sapiens
TVEDGPTKSDPRCLTRYYSSF

SEQ ID NO: 601 - protein, 21 aa, Homo sapiens
VTVEDGPTKSDPRCLTRYYSS

SEQ ID NO: 602 - protein, 21 aa, Homo sapiens
IMSDKRNVILFSVFDENRSWY

SEQ ID NO: 603 - protein, 21 aa, Homo sapiens
QIMSDKRNVILFSVFDENRSW

SEQ ID NO: 604 - protein, 21 aa, Homo sapiens
NQIMSDKRNVILFSVFDENRS

SEQ ID NO: 605 - protein, 21 aa, Homo sapiens
GNQIMSDKRNVILFSVFDENR

SEQ ID NO: 606 - protein, 21 aa, Homo sapiens
RGNQIMSDKRNVILFSVFDEN

SEQ ID NO: 607 - protein, 21 aa, Homo sapiens
QRGNQIMSDKRNVILFSVFDE

SEQ ID NO: 608 - protein, 21 aa, Homo sapiens
DQRGNQIMSDKRNVILFSVFD

SEQ ID NO: 609 - protein, 21 aa, Homo sapiens
VDQRGNQIMSDKRNVILFSVF

SEQ ID NO: 610 - protein, 21 aa, Homo sapiens
SVDQRGNQIMSDKRNVILFSV

SEQ ID NO: 611 - protein, 21 aa, Homo sapiens
ESVDQRGNQIMSDKRNVILFS

SEQ ID NO: 612 - protein, 21 aa, Homo sapiens
KESVDQRGNQIMSDKRNVILF

SEQ ID NO: 613 - protein, 21 aa, Homo sapiens
YKESVDQRGNQIMSDKRNVIL

SEQ ID NO: 614 - protein, 21 aa, Homo sapiens
CYKESVDQRGNQIMSDKRNVI

SEQ ID NO: 615 - protein, 21 aa, Homo sapiens
ICYKESVDQRGNQIMSDKRNV

SEQ ID NO: 616 - protein, 21 aa, Homo sapiens
LICYKESVDQRGNQIMSDKRN

SEQ ID NO: 617 - protein, 21 aa, Homo sapiens
LLICYKESVDQRGNQIMSDKR

SEQ ID NO: 618 - protein, 21 aa, Homo sapiens
PLLICYKESVDQRGNQIMSDK

SEQ ID NO: 619 - protein, 21 aa, Homo sapiens
GPLLICYKESVDQRGNQIMSD

SEQ ID NO: 620 - protein, 21 aa, Homo sapiens
IGPLLICYKESVDQRGNQIMS

SEQ ID NO: 621 - protein, 21 aa, Homo sapiens
LIGPLLICYKESVDQRGNQIM

SEQ ID NO: 622 - protein, 21 aa, Homo sapiens
GLIGPLLICYKESVDQRGNQI

SEQ ID NO: 623 - protein, 21 aa, Homo sapiens
RFLPNPAGVQLEDPEFQASNI

SEQ ID NO: 624 - protein, 21 aa, Homo sapiens
QRFLPNPAGVQLEDPEFQASN

SEQ ID NO: 625 - protein, 21 aa, Homo sapiens
IQRFLPNPAGVQLEDPEFQAS

SEQ ID NO: 626 - protein, 21 aa, Homo sapiens
NIQRFLPNPAGVQLEDPEFQA

SEQ ID NO: 627 - protein, 21 aa, Homo sapiens
ENIQRFLPNPAGVQLEDPEFQ

SEQ ID NO: 628 - protein, 21 aa, Homo sapiens
TENIQRFLPNPAGVQLEDPEF

SEQ ID NO: 629 - protein, 21 aa, Homo sapiens
LTENIQRFLPNPAGVQLEDPE

SEQ ID NO: 630 - protein, 21 aa, Homo sapiens
YLTENIQRFLPNPAGVQLEDP

SEQ ID NO: 631 - protein, 21 aa, Homo sapiens
WYLTENIQRFLPNPAGVQLED

SEQ ID NO: 632 - protein, 21 aa, Homo sapiens
SWYLTENIQRFLPNPAGVQLE

SEQ ID NO: 633 - protein, 21 aa, Homo sapiens
RSWYLTENIQRFLPNPAGVQL

SEQ ID NO: 634 - protein, 21 aa, Homo sapiens
NRSWYLTENIQRFLPNPAGVQ

SEQ ID NO: 635 - protein, 21 aa, Homo sapiens
ENRSWYLTENIQRFLPNPAGV

SEQ ID NO: 636 - protein, 21 aa, Homo sapiens
DENRSWYLTENIQRFLPNPAG

SEQ ID NO: 637 - protein, 21 aa, Homo sapiens
FDENRSWYLTENIQRFLPNPA

SEQ ID NO: 638 - protein, 21 aa, Homo sapiens
VFDENRSWYLTENIQRFLPNP

SEQ ID NO: 639 - protein, 21 aa, Homo sapiens
SVFDENRSWYLTENIQRFLPN

SEQ ID NO: 640 - protein, 21 aa, Homo sapiens
FSVFDENRSWYLTENIQRFLP

SEQ ID NO: 641 - protein, 21 aa, Homo sapiens
LFSVFDENRSWYLTENIQRFL

SEQ ID NO: 642 - protein, 21 aa, Homo sapiens
ILFSVFDENRSWYLTENIQRF

SEQ ID NO: 643 - protein, 21 aa, Homo sapiens
VILFSVFDENRSWYLTENIQR

SEQ ID NO: 644 - protein, 21 aa, Homo sapiens
NIMHSINGYVFDSLQLSVCLH

SEQ ID NO: 645 - protein, 21 aa, Homo sapiens
SNIMHSINGYVFDSLQLSVCL

SEQ ID NO: 646 - protein, 21 aa, Homo sapiens
ASNIMHSINGYVFDSLQLSVC

SEQ ID NO: 647 - protein, 21 aa, Homo sapiens
QASNIMHSINGYVFDSLQLSV

SEQ ID NO: 648 - protein, 21 aa, Homo sapiens
FQASNIMHSINGYVFDSLQLS

SEQ ID NO: 649 - protein, 21 aa, Homo sapiens
EFQASNIMHSINGYVFDSLQL

SEQ ID NO: 650 - protein, 21 aa, Homo sapiens
PEFQASNIMHSINGYVFDSLQ

SEQ ID NO: 651 - protein, 21 aa, Homo sapiens
DPEFQASNIMHSINGYVFDSL

SEQ ID NO: 652 - protein, 21 aa, Homo sapiens
EDPEFQASNIMHSINGYVFDS

SEQ ID NO: 653 - protein, 21 aa, Homo sapiens
LEDPEFQASNIMHSINGYVFD

SEQ ID NO: 654 - protein, 21 aa, Homo sapiens
QLEDPEFQASNIMHSINGYVF

SEQ ID NO: 655 - protein, 21 aa, Homo sapiens
VQLEDPEFQASNIMHSINGYV

SEQ ID NO: 656 - protein, 21 aa, Homo sapiens
GVQLEDPEFQASNIMHSINGY

SEQ ID NO: 657 - protein, 21 aa, Homo sapiens
AGVQLEDPEFQASNIMHSING

SEQ ID NO: 658 - protein, 21 aa, Homo sapiens
PAGVQLEDPEFQASNIMHSIN

SEQ ID NO: 659 - protein, 21 aa, Homo sapiens
NPAGVQLEDPEFQASNIMHSI

SEQ ID NO: 660 - protein, 21 aa, Homo sapiens
PNPAGVQLEDPEFQASNIMHS

SEQ ID NO: 661 - protein, 21 aa, Homo sapiens
LPNPAGVQLEDPEFQASNIMH

SEQ ID NO: 662 - protein, 21 aa, Homo sapiens
FLPNPAGVQLEDPEFQASNIM

SEQ ID NO: 663 - protein, 21 aa, Homo sapiens
RFLPNPAGVQLEDPEFQASNI

SEQ ID NO: 664 - protein, 21 aa, Homo sapiens
QRFLPNPAGVQLEDPEFQASN

SEQ ID NO: 665 - protein, 21 aa, Homo sapiens
MHSINGYVFDSLQLSVCLHEV

SEQ ID NO: 666 - protein, 21 aa, Homo sapiens
IMHSINGYVFDSLQLSVCLHE

SEQ ID NO: 667 - protein, 21 aa, Homo sapiens
NIMHSINGYVFDSLQLSVCLH

SEQ ID NO: 668 - protein, 21 aa, Homo sapiens
SNIMHSINGYVFDSLQLSVCL

SEQ ID NO: 669 - protein, 21 aa, Homo sapiens
ASNIMHSINGYVFDSLQLSVC

SEQ ID NO: 670 - protein, 21 aa, Homo sapiens
QASNIMHSINGYVFDSLQLSV

SEQ ID NO: 671 - protein, 21 aa, Homo sapiens
FQASNIMHSINGYVFDSLQLS

SEQ ID NO: 672 - protein, 21 aa, Homo sapiens
EFQASNIMHSINGYVFDSLQL

SEQ ID NO: 673 - protein, 21 aa, Homo sapiens
PEFQASNIMHSINGYVFDSLQ

SEQ ID NO: 674 - protein, 21 aa, Homo sapiens
DPEFQASNIMHSINGYVFDSL

SEQ ID NO: 675 - protein, 21 aa, Homo sapiens
EDPEFQASNIMHSINGYVFDS

SEQ ID NO: 676 - protein, 21 aa, Homo sapiens
LEDPEFQASNIMHSINGYVFD

SEQ ID NO: 677 - protein, 21 aa, Homo sapiens
QLEDPEFQASNIMHSINGYVF

SEQ ID NO: 678 - protein, 21 aa, Homo sapiens
VQLEDPEFQASNIMHSINGYV

SEQ ID NO: 679 - protein, 21 aa, Homo sapiens
GVQLEDPEFQASNIMHSINGY

SEQ ID NO: 680 - protein, 21 aa, Homo sapiens
AGVQLEDPEFQASNIMHSING

SEQ ID NO: 681 - protein, 21 aa, Homo sapiens
PAGVQLEDPEFQASNIMHSIN

SEQ ID NO: 682 - protein, 21 aa, Homo sapiens
NPAGVQLEDPEFQASNIMHSI

SEQ ID NO: 683 - protein, 21 aa, Homo sapiens
PNPAGVQLEDPEFQASNIMHS

SEQ ID NO: 684 - protein, 21 aa, Homo sapiens
LPNPAGVQLEDPEFQASNIMH

SEQ ID NO: 685 - protein, 21 aa, Homo sapiens
FLPNPAGVQLEDPEFQASNIM

SEQ ID NO: 686 - protein, 21 aa, Homo sapiens
NGYVFDSLQLSVCLHEVAYWY

SEQ ID NO: 687 - protein, 21 aa, Homo sapiens
INGYVFDSLQLSVCLHEVAYW

SEQ ID NO: 688 - protein, 21 aa, Homo sapiens
SINGYVFDSLQLSVCLHEVAY

SEQ ID NO: 689 - protein, 21 aa, Homo sapiens
HSINGYVFDSLQLSVCLHEVA

SEQ ID NO: 690 - protein, 21 aa, Homo sapiens
MHSINGYVFDSLQLSVCLHEV

SEQ ID NO: 691 - protein, 21 aa, Homo sapiens
IMHSINGYVFDSLQLSVCLHE

SEQ ID NO: 692 - protein, 21 aa, Homo sapiens
NIMHSINGYVFDSLQLSVCLH

SEQ ID NO: 693 - protein, 21 aa, Homo sapiens
SNIMHSINGYVFDSLQLSVCL

SEQ ID NO: 694 - protein, 21 aa, Homo sapiens
ASNIMHSINGYVFDSLQLSVC

SEQ ID NO: 695 - protein, 21 aa, Homo sapiens
QASNIMHSINGYVFDSLQLSV

SEQ ID NO: 696 - protein, 21 aa, Homo sapiens
FQASNIMHSINGYVFDSLQLS

SEQ ID NO: 697 - protein, 21 aa, Homo sapiens
EFQASNIMHSINGYVFDSLQL

SEQ ID NO: 698 - protein, 21 aa, Homo sapiens
PEFQASNIMHSINGYVFDSLQ

SEQ ID NO: 699 - protein, 21 aa, Homo sapiens
DPEFQASNIMHSINGYVFDSL

SEQ ID NO: 700 - protein, 21 aa, Homo sapiens
EDPEFQASNIMHSINGYVFDS

SEQ ID NO: 701 - protein, 21 aa, Homo sapiens
LEDPEFQASNIMHSINGYVFD

SEQ ID NO: 702 - protein, 21 aa, Homo sapiens
QLEDPEFQASNIMHSINGYVF

SEQ ID NO: 703 - protein, 21 aa, Homo sapiens
VQLEDPEFQASNIMHSINGYV

SEQ ID NO: 704 - protein, 21 aa, Homo sapiens
GVQLEDPEFQASNIMHSINGY

SEQ ID NO: 705 - protein, 21 aa, Homo sapiens
AGVQLEDPEFQASNIMHSING

SEQ ID NO: 706 - protein, 21 aa, Homo sapiens
PAGVQLEDPEFQASNIMHSIN

SEQ ID NO: 707 - protein, 21 aa, Homo sapiens
VYEDTLTLFPFSGETVFMSME

SEQ ID NO: 708 - protein, 21 aa, Homo sapiens
MVYEDTLTLFPFSGETVFMSM

SEQ ID NO: 709 - protein, 21 aa, Homo sapiens
KMVYEDTLTLFPFSGETVFMS

SEQ ID NO: 710 - protein, 21 aa, Homo sapiens
HKMVYEDTLTLFPFSGETVFM

SEQ ID NO: 711 - protein, 21 aa, Homo sapiens
KHKMVYEDTLTLFPFSGETVF

SEQ ID NO: 712 - protein, 21 aa, Homo sapiens
FKHKMVYEDTLTLFPFSGETV

SEQ ID NO: 713 - protein, 21 aa, Homo sapiens
TFKHKMVYEDTLTLFPFSGET

SEQ ID NO: 714 - protein, 21 aa, Homo sapiens
YTFKHKMVYEDTLTLFPFSGE

SEQ ID NO: 715 - protein, 21 aa, Homo sapiens
GYTFKHKMVYEDTLTLFPFSG

SEQ ID NO: 716 - protein, 21 aa, Homo sapiens
SGYTFKHKMVYEDTLTLFPFS

SEQ ID NO: 717 - protein, 21 aa, Homo sapiens
FSGYTFKHKMVYEDTLTLFPF

SEQ ID NO: 718 - protein, 21 aa, Homo sapiens
FFSGYTFKHKMVYEDTLTLFP

SEQ ID NO: 719 - protein, 21 aa, Homo sapiens
VFFSGYTFKHKMVYEDTLTLF

SEQ ID NO: 720 - protein, 21 aa, Homo sapiens
SVFFSGYTFKHKMVYEDTLTL

SEQ ID NO: 721 - protein, 21 aa, Homo sapiens
LSVFFSGYTFKHKMVYEDTLT

SEQ ID NO: 722 - protein, 21 aa, Homo sapiens
FLSVFFSGYTFKHKMVYEDTL

SEQ ID NO: 723 - protein, 21 aa, Homo sapiens
DFLSVFFSGYTFKHKMVYEDT

SEQ ID NO: 724 - protein, 21 aa, Homo sapiens
TDFLSVFFSGYTFKHKMVYED

SEQ ID NO: 725 - protein, 21 aa, Homo sapiens
QTDFLSVFFSGYTFKHKMVYE

SEQ ID NO: 726 - protein, 21 aa, Homo sapiens
AQTDFLSVFFSGYTFKHKMVY

SEQ ID NO: 727 - protein, 21 aa, Homo sapiens
GAQTDFLSVFFSGYTFKHKMV

SEQ ID NO: 728 - protein, 21 aa, Homo sapiens
NPGLWILGCHNSDFRNRGMTA

SEQ ID NO: 729 - protein, 21 aa, Homo sapiens
ENPGLWILGCHNSDFRNRGMT

SEQ ID NO: 730 - protein, 21 aa, Homo sapiens
MENPGLWILGCHNSDFRNRGM

SEQ ID NO: 731 - protein, 21 aa, Homo sapiens
SMENPGLWILGCHNSDFRNRG

SEQ ID NO: 732 - protein, 21 aa, Homo sapiens
MSMENPGLWILGCHNSDFRNR

SEQ ID NO: 733 - protein, 21 aa, Homo sapiens
FMSMENPGLWILGCHNSDFRN

SEQ ID NO: 734 - protein, 21 aa, Homo sapiens
VFMSMENPGLWILGCHNSDFR

SEQ ID NO: 735 - protein, 21 aa, Homo sapiens
TVFMSMENPGLWILGCHNSDF

SEQ ID NO: 736 - protein, 21 aa, Homo sapiens
ETVFMSMENPGLWILGCHNSD

SEQ ID NO: 737 - protein, 21 aa, Homo sapiens
GETVFMSMENPGLWILGCHNS

SEQ ID NO: 738 - protein, 21 aa, Homo sapiens
SGETVFMSMENPGLWILGCHN

SEQ ID NO: 739 - protein, 21 aa, Homo sapiens
FSGETVFMSMENPGLWILGCH

SEQ ID NO: 740 - protein, 21 aa, Homo sapiens
PFSGETVFMSMENPGLWILGC

SEQ ID NO: 741 - protein, 21 aa, Homo sapiens
FPFSGETVFMSMENPGLWILG

SEQ ID NO: 742 - protein, 21 aa, Homo sapiens
LFPFSGETVFMSMENPGLWIL

SEQ ID NO: 743 - protein, 21 aa, Homo sapiens
TLFPFSGETVFMSMENPGLWI

SEQ ID NO: 744 - protein, 21 aa, Homo sapiens
LTLFPFSGETVFMSMENPGLW

SEQ ID NO: 745 - protein, 21 aa, Homo sapiens
TLTLFPFSGETVFMSMENPGL

SEQ ID NO: 746 - protein, 21 aa, Homo sapiens
DTLTLFPFSGETVFMSMENPG

SEQ ID NO: 747 - protein, 21 aa, Homo sapiens
EDTLTLFPFSGETVFMSMENP

SEQ ID NO: 748 - protein, 21 aa, Homo sapiens
YEDTLTLFPFSGETVFMSMEN

SEQ ID NO: 749 - protein, 21 aa, Homo sapiens
GLWILGCHNSDFRNRGMTALL

SEQ ID NO: 750 - protein, 21 aa, Homo sapiens
PGLWILGCHNSDFRNRGMTAL

SEQ ID NO: 751 - protein, 21 aa, Homo sapiens
NPGLWILGCHNSDFRNRGMTA

SEQ ID NO: 752 - protein, 21 aa, Homo sapiens
ENPGLWILGCHNSDFRNRGMT

SEQ ID NO: 753 - protein, 21 aa, Homo sapiens
MENPGLWILGCHNSDFRNRGM

SEQ ID NO: 754 - protein, 21 aa, Homo sapiens
SMENPGLWILGCHNSDFRNRG

SEQ ID NO: 755 - protein, 21 aa, Homo sapiens
MSMENPGLWILGCHNSDFRNR

SEQ ID NO: 756 - protein, 21 aa, Homo sapiens
FMSMENPGLWILGCHNSDFRN

SEQ ID NO: 757 - protein, 21 aa, Homo sapiens
VFMSMENPGLWILGCHNSDFR

SEQ ID NO: 758 - protein, 21 aa, Homo sapiens
TVFMSMENPGLWILGCHNSDF

SEQ ID NO: 759 - protein, 21 aa, Homo sapiens
ETVFMSMENPGLWILGCHNSD

SEQ ID NO: 760 - protein, 21 aa, Homo sapiens
GETVFMSMENPGLWILGCHNS

SEQ ID NO: 761 - protein, 21 aa, Homo sapiens
SGETVFMSMENPGLWILGCHN

SEQ ID NO: 762 - protein, 21 aa, Homo sapiens
FSGETVFMSMENPGLWILGCH

SEQ ID NO: 763 - protein, 21 aa, Homo sapiens
PFSGETVFMSMENPGLWILGC

SEQ ID NO: 764 - protein, 21 aa, Homo sapiens
FPFSGETVFMSMENPGLWILG

SEQ ID NO: 765 - protein, 21 aa, Homo sapiens
LFPFSGETVFMSMENPGLWIL

SEQ ID NO: 766 - protein, 21 aa, Homo sapiens
TLFPFSGETVFMSMENPGLWI

SEQ ID NO: 767 - protein, 21 aa, Homo sapiens
LTLFPFSGETVFMSMENPGLW

SEQ ID NO: 768 - protein, 21 aa, Homo sapiens
TLTLFPFSGETVFMSMENPGL

SEQ ID NO: 769 - protein, 21 aa, Homo sapiens
DTLTLFPFSGETVFMSMENPG

SEQ ID NO: 770 - protein, 21 aa, Homo sapiens
GMTALLKVSSCDKNTGDYYED

SEQ ID NO: 771 - protein, 21 aa, Homo sapiens
RGMTALLKVSSCDKNTGDYYE

SEQ ID NO: 772 - protein, 21 aa, Homo sapiens
NRGMTALLKVSSCDKNTGDYY

SEQ ID NO: 773 - protein, 21 aa, Homo sapiens
RNRGMTALLKVSSCDKNTGDY

SEQ ID NO: 774 - protein, 21 aa, Homo sapiens
FRNRGMTALLKVSSCDKNTGD

SEQ ID NO: 775 - protein, 21 aa, Homo sapiens
DFRNRGMTALLKVSSCDKNTG

SEQ ID NO: 776 - protein, 21 aa, Homo sapiens
SDFRNRGMTALLKVSSCDKNT

SEQ ID NO: 777 - protein, 21 aa, Homo sapiens
NSDFRNRGMTALLKVSSCDKN

SEQ ID NO: 778 - protein, 21 aa, Homo sapiens
HNSDFRNRGMTALLKVSSCDK

SEQ ID NO: 779 - protein, 21 aa, Homo sapiens
CHNSDFRNRGMTALLKVSSCD

SEQ ID NO: 780 - protein, 21 aa, Homo sapiens
GCHNSDFRNRGMTALLKVSSC

SEQ ID NO: 781 - protein, 21 aa, Homo sapiens
LGCHNSDFRNRGMTALLKVSS

SEQ ID NO: 782 - protein, 21 aa, Homo sapiens
ILGCHNSDFRNRGMTALLKVS

SEQ ID NO: 783 - protein, 21 aa, Homo sapiens
WILGCHNSDFRNRGMTALLKV

SEQ ID NO: 784 - protein, 21 aa, Homo sapiens
LWILGCHNSDFRNRGMTALLK

SEQ ID NO: 785 - protein, 21 aa, Homo sapiens
GLWILGCHNSDFRNRGMTALL

SEQ ID NO: 786 - protein, 21 aa, Homo sapiens
PGLWILGCHNSDFRNRGMTAL

SEQ ID NO: 787 - protein, 21 aa, Homo sapiens
NPGLWILGCHNSDFRNRGMTA

SEQ ID NO: 788 - protein, 21 aa, Homo sapiens
ENPGLWILGCHNSDFRNRGMT

SEQ ID NO: 789 - protein, 21 aa, Homo sapiens
MENPGLWILGCHNSDFRNRGM

SEQ ID NO: 790 - protein, 21 aa, Homo sapiens
SMENPGLWILGCHNSDFRNRG

SEQ ID NO: 791 - protein, 21 aa, Homo sapiens
VSSCDKNTGDYYEDSYEDISA

SEQ ID NO: 792 - protein, 21 aa, Homo sapiens
KVSSCDKNTGDYYEDSYEDIS

SEQ ID NO: 793 - protein, 21 aa, Homo sapiens
LKVSSCDKNTGDYYEDSYEDI

SEQ ID NO: 794 - protein, 21 aa, Homo sapiens
LLKVSSCDKNTGDYYEDSYED

SEQ ID NO: 795 - protein, 21 aa, Homo sapiens
ALLKVSSCDKNTGDYYEDSYE

SEQ ID NO: 796 - protein, 21 aa, Homo sapiens
TALLKVSSCDKNTGDYYEDSY

SEQ ID NO: 797 - protein, 21 aa, Homo sapiens
MTALLKVSSCDKNTGDYYEDS

SEQ ID NO: 798 - protein, 21 aa, Homo sapiens
GMTALLKVSSCDKNTGDYYED

SEQ ID NO: 799 - protein, 21 aa, Homo sapiens
RGMTALLKVSSCDKNTGDYYE

SEQ ID NO: 800 - protein, 21 aa, Homo sapiens
NRGMTALLKVSSCDKNTGDYY

SEQ ID NO: 801 - protein, 21 aa, Homo sapiens
RNRGMTALLKVSSCDKNTGDY

SEQ ID NO: 802 - protein, 21 aa, Homo sapiens
FRNRGMTALLKVSSCDKNTGD

SEQ ID NO: 803 - protein, 21 aa, Homo sapiens
DFRNRGMTALLKVSSCDKNTG

SEQ ID NO: 804 - protein, 21 aa, Homo sapiens
SDFRNRGMTALLKVSSCDKNT

SEQ ID NO: 805 - protein, 21 aa, Homo sapiens
NSDFRNRGMTALLKVSSCDKN

SEQ ID NO: 806 - protein, 21 aa, Homo sapiens
HNSDFRNRGMTALLKVSSCDK

SEQ ID NO: 807 - protein, 21 aa, Homo sapiens
CHNSDFRNRGMTALLKVSSCD

SEQ ID NO: 808 - protein, 21 aa, Homo sapiens
GCHNSDFRNRGMTALLKVSSC

SEQ ID NO: 809 - protein, 21 aa, Homo sapiens
LGCHNSDFRNRGMTALLKVSS

SEQ ID NO: 810 - protein, 21 aa, Homo sapiens
ILGCHNSDFRNRGMTALLKVS

SEQ ID NO: 811 - protein, 21 aa, Homo sapiens
WILGCHNSDFRNRGMTALLKV

SEQ ID NO: 812 - protein, 21 aa, Homo sapiens
LSKNNAIEPRSFSQNSRHPST

SEQ ID NO: 813 - protein, 21 aa, Homo sapiens
LLSKNNAIEPRSFSQNSRHPS

SEQ ID NO: 814 - protein, 21 aa, Homo sapiens
YLLSKNNAIEPRSFSQNSRHP

SEQ ID NO: 815 - protein, 21 aa, Homo sapiens
AYLLSKNNAIEPRSFSQNSRH

SEQ ID NO: 816 - protein, 21 aa, Homo sapiens
SAYLLSKNNAIEPRSFSQNSR

SEQ ID NO: 817 - protein, 21 aa, Homo sapiens
ISAYLLSKNNAIEPRSFSQNS

SEQ ID NO: 818 - protein, 21 aa, Homo sapiens
DISAYLLSKNNAIEPRSFSQN

SEQ ID NO: 819 - protein, 21 aa, Homo sapiens
EDISAYLLSKNNAIEPRSFSQ

SEQ ID NO: 820 - protein, 21 aa, Homo sapiens
YEDISAYLLSKNNAIEPRSFS

SEQ ID NO: 821 - protein, 21 aa, Homo sapiens
SYEDISAYLLSKNNAIEPRSF

SEQ ID NO: 822 - protein, 21 aa, Homo sapiens
DSYEDISAYLLSKNNAIEPRS

SEQ ID NO: 823 - protein, 21 aa, Homo sapiens
EDSYEDISAYLLSKNNAIEPR

SEQ ID NO: 824 - protein, 21 aa, Homo sapiens
YEDSYEDISAYLLSKNNAIEP

SEQ ID NO: 825 - protein, 21 aa, Homo sapiens
YYEDSYEDISAYLLSKNNAIE

SEQ ID NO: 826 - protein, 21 aa, Homo sapiens
DYYEDSYEDISAYLLSKNNAI

SEQ ID NO: 827 - protein, 21 aa, Homo sapiens
GDYYEDSYEDISAYLLSKNNA

SEQ ID NO: 828 - protein, 21 aa, Homo sapiens
TGDYYEDSYEDISAYLLSKNN

SEQ ID NO: 829 - protein, 21 aa, Homo sapiens
NTGDYYEDSYEDISAYLLSKN

SEQ ID NO: 830 - protein, 21 aa, Homo sapiens
KNTGDYYEDSYEDISAYLLSK

SEQ ID NO: 831 - protein, 21 aa, Homo sapiens
DKNTGDYYEDSYEDISAYLLS

SEQ ID NO: 832 - protein, 21 aa, Homo sapiens
CDKNTGDYYEDSYEDISAYLL

SEQ ID NO: 833 - protein, 21 aa, Homo sapiens
HDRMLMDKNATALRLNHMSNK

SEQ ID NO: 834 - protein, 21 aa, Homo sapiens
IHDRMLMDKNATALRLNHMSN

SEQ ID NO: 835 - protein, 21 aa, Homo sapiens
LIHDRMLMDKNATALRLNHMS

SEQ ID NO: 836 - protein, 21 aa, Homo sapiens
PLIHDRMLMDKNATALRLNHM

SEQ ID NO: 837 - protein, 21 aa, Homo sapiens
TPLIHDRMLMDKNATALRLNH

SEQ ID NO: 838 - protein, 21 aa, Homo sapiens
VTPLIHDRMLMDKNATALRLN

SEQ ID NO: 839 - protein, 21 aa, Homo sapiens
KVTPLIHDRMLMDKNATALRL

SEQ ID NO: 840 - protein, 21 aa, Homo sapiens
KKVTPLIHDRMLMDKNATALR

SEQ ID NO: 841 - protein, 21 aa, Homo sapiens
FKKVTPLIHDRMLMDKNATAL

SEQ ID NO: 842 - protein, 21 aa, Homo sapiens
EFKKVTPLIHDRMLMDKNATA

SEQ ID NO: 843 - protein, 21 aa, Homo sapiens
TEFKKVTPLIHDRMLMDKNAT

SEQ ID NO: 844 - protein, 21 aa, Homo sapiens
DTEFKKVTPLIHDRMLMDKNA

SEQ ID NO: 845 - protein, 21 aa, Homo sapiens
SDTEFKKVTPLIHDRMLMDKN

SEQ ID NO: 846 - protein, 21 aa, Homo sapiens
ESDTEFKKVTPLIHDRMLMDK

SEQ ID NO: 847 - protein, 21 aa, Homo sapiens
LESDTEFKKVTPLIHDRMLMD

SEQ ID NO: 848 - protein, 21 aa, Homo sapiens
ILESDTEFKKVTPLIHDRMLM

SEQ ID NO: 849 - protein, 21 aa, Homo sapiens
NILESDTEFKKVTPLIHDRML

SEQ ID NO: 850 - protein, 21 aa, Homo sapiens
QNILESDTEFKKVTPLIHDRM

SEQ ID NO: 851 - protein, 21 aa, Homo sapiens
WQNILESDTEFKKVTPLIHDR

SEQ ID NO: 852 - protein, 21 aa, Homo sapiens
VWQNILESDTEFKKVTPLIHD

SEQ ID NO: 853 - protein, 21 aa, Homo sapiens
SVWQNILESDTEFKKVTPLIH

SEQ ID NO: 854 - protein, 21 aa, Homo sapiens
KVVFQEFTDGSFTQPLYRGEL

SEQ ID NO: 855 - protein, 21 aa, Homo sapiens
KKVVFQEFTDGSFTQPLYRGE

SEQ ID NO: 856 - protein, 21 aa, Homo sapiens
FKKVVFQEFTDGSFTQPLYRG

SEQ ID NO: 857 - protein, 21 aa, Homo sapiens
QFKKVVFQEFTDGSFTQPLYR

SEQ ID NO: 858 - protein, 21 aa, Homo sapiens
PQFKKVVFQEFTDGSFTQPLY

SEQ ID NO: 859 - protein, 21 aa, Homo sapiens
VPQFKKVVFQEFTDGSFTQPL

SEQ ID NO: 860 - protein, 21 aa, Homo sapiens
SVPQFKKVVFQEFTDGSFTQP

SEQ ID NO: 861 - protein, 21 aa, Homo sapiens
GSVPQFKKVVFQEFTDGSFTQ

SEQ ID NO: 862 - protein, 21 aa, Homo sapiens
SGSVPQFKKVVFQEFTDGSFT

SEQ ID NO: 863 - protein, 21 aa, Homo sapiens
QSGSVPQFKKVVFQEFTDGSF

SEQ ID NO: 864 - protein, 21 aa, Homo sapiens
AQSGSVPQFKKVVFQEFTDGS

SEQ ID NO: 865 - protein, 21 aa, Homo sapiens
RAQSGSVPQFKKVVFQEFTDG

SEQ ID NO: 866 - protein, 21 aa, Homo sapiens
NRAQSGSVPQFKKVVFQEFTD

SEQ ID NO: 867 - protein, 21 aa, Homo sapiens
RNRAQSGSVPQFKKVVFQEFT

SEQ ID NO: 868 - protein, 21 aa, Homo sapiens
LRNRAQSGSVPQFKKVVFQEF

SEQ ID NO: 869 - protein, 21 aa, Homo sapiens
VLRNRAQSGSVPQFKKVVFQE

SEQ ID NO: 870 - protein, 21 aa, Homo sapiens
HVLRNRAQSGSVPQFKKVVFQ

SEQ ID NO: 871 - protein, 21 aa, Homo sapiens
PHVLRNRAQSGSVPQFKKVVF

SEQ ID NO: 872 - protein, 21 aa, Homo sapiens
SPHVLRNRAQSGSVPQFKKVV

SEQ ID NO: 873 - protein, 21 aa, Homo sapiens
SSPHVLRNRAQSGSVPQFKKV

SEQ ID NO: 874 - protein, 21 aa, Homo sapiens
SSSPHVLRNRAQSGSVPQFKK

SEQ ID NO: 875 - protein, 21 aa, Homo sapiens
GPYIRAEVEDNIMVTFRNQAS

SEQ ID NO: 876 - protein, 21 aa, Homo sapiens
LGPYIRAEVEDNIMVTFRNQA

SEQ ID NO: 877 - protein, 21 aa, Homo sapiens
LLGPYIRAEVEDNIMVTFRNQ

SEQ ID NO: 878 - protein, 21 aa, Homo sapiens
GLLGPYIRAEVEDNIMVTFRN

SEQ ID NO: 879 - protein, 21 aa, Homo sapiens
LGLLGPYIRAEVEDNIMVTFR

SEQ ID NO: 880 - protein, 21 aa, Homo sapiens
HLGLLGPYIRAEVEDNIMVTF

SEQ ID NO: 881 - protein, 21 aa, Homo sapiens
EHLGLLGPYIRAEVEDNIMVT

SEQ ID NO: 882 - protein, 21 aa, Homo sapiens
NEHLGLLGPYIRAEVEDNIMV

SEQ ID NO: 883 - protein, 21 aa, Homo sapiens
LNEHLGLLGPYIRAEVEDNIM

SEQ ID NO: 884 - protein, 21 aa, Homo sapiens
ELNEHLGLLGPYIRAEVEDNI

SEQ ID NO: 885 - protein, 21 aa, Homo sapiens
GELNEHLGLLGPYIRAEVEDN

SEQ ID NO: 886 - protein, 21 aa, Homo sapiens
RGELNEHLGLLGPYIRAEVED

SEQ ID NO: 887 - protein, 21 aa, Homo sapiens
YRGELNEHLGLLGPYIRAEVE

SEQ ID NO: 888 - protein, 21 aa, Homo sapiens
LYRGELNEHLGLLGPYIRAEV

SEQ ID NO: 889 - protein, 21 aa, Homo sapiens
PLYRGELNEHLGLLGPYIRAE

SEQ ID NO: 890 - protein, 21 aa, Homo sapiens
QPLYRGELNEHLGLLGPYIRA

SEQ ID NO: 891 - protein, 21 aa, Homo sapiens
TQPLYRGELNEHLGLLGPYIR

SEQ ID NO: 892 - protein, 21 aa, Homo sapiens
FTQPLYRGELNEHLGLLGPYI

SEQ ID NO: 893 - protein, 21 aa, Homo sapiens
SFTQPLYRGELNEHLGLLGPY

SEQ ID NO: 894 - protein, 21 aa, Homo sapiens
GSFTQPLYRGELNEHLGLLGP

SEQ ID NO: 895 - protein, 21 aa, Homo sapiens
DGSFTQPLYRGELNEHLGLLG

SEQ ID NO: 896 - protein, 21 aa, Homo sapiens
PYIRAEVEDNIMVTFRNQASR

SEQ ID NO: 897 - protein, 21 aa, Homo sapiens
GPYIRAEVEDNIMVTFRNQAS

SEQ ID NO: 898 - protein, 21 aa, Homo sapiens
LGPYIRAEVEDNIMVTFRNQA

SEQ ID NO: 899 - protein, 21 aa, Homo sapiens
LLGPYIRAEVEDNIMVTFRNQ

SEQ ID NO: 900 - protein, 21 aa, Homo sapiens
GLLGPYIRAEVEDNIMVTFRN

SEQ ID NO: 901 - protein, 21 aa, Homo sapiens
LGLLGPYIRAEVEDNIMVTFR

SEQ ID NO: 902 - protein, 21 aa, Homo sapiens
HLGLLGPYIRAEVEDNIMVTF

SEQ ID NO: 903 - protein, 21 aa, Homo sapiens
EHLGLLGPYIRAEVEDNIMVT

SEQ ID NO: 904 - protein, 21 aa, Homo sapiens
NEHLGLLGPYIRAEVEDNIMV

SEQ ID NO: 905 - protein, 21 aa, Homo sapiens
LNEHLGLLGPYIRAEVEDNIM

SEQ ID NO: 906 - protein, 21 aa, Homo sapiens
ELNEHLGLLGPYIRAEVEDNI

SEQ ID NO: 907 - protein, 21 aa, Homo sapiens
GELNEHLGLLGPYIRAEVEDN

SEQ ID NO: 908 - protein, 21 aa, Homo sapiens
RGELNEHLGLLGPYIRAEVED

SEQ ID NO: 909 - protein, 21 aa, Homo sapiens
YRGELNEHLGLLGPYIRAEVE

SEQ ID NO: 910 - protein, 21 aa, Homo sapiens
LYRGELNEHLGLLGPYIRAEV

SEQ ID NO: 911 - protein, 21 aa, Homo sapiens
PLYRGELNEHLGLLGPYIRAE

SEQ ID NO: 912 - protein, 21 aa, Homo sapiens
QPLYRGELNEHLGLLGPYIRA

SEQ ID NO: 913 - protein, 21 aa, Homo sapiens
TQPLYRGELNEHLGLLGPYIR

SEQ ID NO: 914 - protein, 21 aa, Homo sapiens
FTQPLYRGELNEHLGLLGPYI

SEQ ID NO: 915 - protein, 21 aa, Homo sapiens
SFTQPLYRGELNEHLGLLGPY

SEQ ID NO: 916 - protein, 21 aa, Homo sapiens
GSFTQPLYRGELNEHLGLLGP

SEQ ID NO: 917 - protein, 21 aa, Homo sapiens
ASRPYSFYSSLISYEEDQRQG

SEQ ID NO: 918 - protein, 21 aa, Homo sapiens
QASRPYSFYSSLISYEEDQRQ

SEQ ID NO: 919 - protein, 21 aa, Homo sapiens
NQASRPYSFYSSLISYEEDQR

SEQ ID NO: 920 - protein, 21 aa, Homo sapiens
RNQASRPYSFYSSLISYEEDQ

SEQ ID NO: 921 - protein, 21 aa, Homo sapiens
FRNQASRPYSFYSSLISYEED

SEQ ID NO: 922 - protein, 21 aa, Homo sapiens
TFRNQASRPYSFYSSLISYEE

SEQ ID NO: 923 - protein, 21 aa, Homo sapiens
VTFRNQASRPYSFYSSLISYE

SEQ ID NO: 924 - protein, 21 aa, Homo sapiens
MVTFRNQASRPYSFYSSLISY

SEQ ID NO: 925 - protein, 21 aa, Homo sapiens
IMVTFRNQASRPYSFYSSLIS

SEQ ID NO: 926 - protein, 21 aa, Homo sapiens
NIMVTFRNQASRPYSFYSSLI

SEQ ID NO: 927 - protein, 21 aa, Homo sapiens
DNIMVTFRNQASRPYSFYSSL

SEQ ID NO: 928 - protein, 21 aa, Homo sapiens
EDNIMVTFRNQASRPYSFYSS

SEQ ID NO: 929 - protein, 21 aa, Homo sapiens
VEDNIMVTFRNQASRPYSFYS

SEQ ID NO: 930 - protein, 21 aa, Homo sapiens
EVEDNIMVTFRNQASRPYSFY

SEQ ID NO: 931 - protein, 21 aa, Homo sapiens
AEVEDNIMVTFRNQASRPYSF

SEQ ID NO: 932 - protein, 21 aa, Homo sapiens
RAEVEDNIMVTFRNQASRPYS

SEQ ID NO: 933 - protein, 21 aa, Homo sapiens
IRAEVEDNIMVTFRNQASRPY

SEQ ID NO: 934 - protein, 21 aa, Homo sapiens
YIRAEVEDNIMVTFRNQASRP

SEQ ID NO: 935 - protein, 21 aa, Homo sapiens
PYIRAEVEDNIMVTFRNQASR

SEQ ID NO: 936 - protein, 21 aa, Homo sapiens
GPYIRAEVEDNIMVTFRNQAS

SEQ ID NO: 937 - protein, 21 aa, Homo sapiens
LGPYIRAEVEDNIMVTFRNQA

SEQ ID NO: 938 - protein, 21 aa, Homo sapiens
RPYSFYSSLISYEEDQRQGAE

SEQ ID NO: 939 - protein, 21 aa, Homo sapiens
SRPYSFYSSLISYEEDQRQGA

SEQ ID NO: 940 - protein, 21 aa, Homo sapiens
ASRPYSFYSSLISYEEDQRQG

SEQ ID NO: 941 - protein, 21 aa, Homo sapiens
QASRPYSFYSSLISYEEDQRQ

SEQ ID NO: 942 - protein, 21 aa, Homo sapiens
NQASRPYSFYSSLISYEEDQR

SEQ ID NO: 943 - protein, 21 aa, Homo sapiens
RNQASRPYSFYSSLISYEEDQ

SEQ ID NO: 944 - protein, 21 aa, Homo sapiens
FRNQASRPYSFYSSLISYEED

SEQ ID NO: 945 - protein, 21 aa, Homo sapiens
TFRNQASRPYSFYSSLISYEE

SEQ ID NO: 946 - protein, 21 aa, Homo sapiens
VTFRNQASRPYSFYSSLISYE

SEQ ID NO: 947 - protein, 21 aa, Homo sapiens
MVTFRNQASRPYSFYSSLISY

SEQ ID NO: 948 - protein, 21 aa, Homo sapiens
IMVTFRNQASRPYSFYSSLIS

SEQ ID NO: 949 - protein, 21 aa, Homo sapiens
NIMVTFRNQASRPYSFYSSLI

SEQ ID NO: 950 - protein, 21 aa, Homo sapiens
DNIMVTFRNQASRPYSFYSSL

SEQ ID NO: 951 - protein, 21 aa, Homo sapiens
EDNIMVTFRNQASRPYSFYSS

SEQ ID NO: 952 - protein, 21 aa, Homo sapiens
VEDNIMVTFRNQASRPYSFYS

SEQ ID NO: 953 - protein, 21 aa, Homo sapiens
EVEDNIMVTFRNQASRPYSFY

SEQ ID NO: 954 - protein, 21 aa, Homo sapiens
AEVEDNIMVTFRNQASRPYSF

SEQ ID NO: 955 - protein, 21 aa, Homo sapiens
RAEVEDNIMVTFRNQASRPYS

SEQ ID NO: 956 - protein, 21 aa, Homo sapiens
IRAEVEDNIMVTFRNQASRPY

SEQ ID NO: 957 - protein, 21 aa, Homo sapiens
YIRAEVEDNIMVTFRNQASRP

SEQ ID NO: 958 - protein, 21 aa, Homo sapiens
PYIRAEVEDNIMVTFRNQASR

SEQ ID NO: 959 - protein, 21 aa, Homo sapiens
YSSLISYEEDQRQGAEPRKNF

SEQ ID NO: 960 - protein, 21 aa, Homo sapiens
FYSSLISYEEDQRQGAEPRKN

SEQ ID NO: 961 - protein, 21 aa, Homo sapiens
SFYSSLISYEEDQRQGAEPRK

SEQ ID NO: 962 - protein, 21 aa, Homo sapiens
YSFYSSLISYEEDQRQGAEPR

SEQ ID NO: 963 - protein, 21 aa, Homo sapiens
PYSFYSSLISYEEDQRQGAEP

SEQ ID NO: 964 - protein, 21 aa, Homo sapiens
RPYSFYSSLISYEEDQRQGAE

SEQ ID NO: 965 - protein, 21 aa, Homo sapiens
SRPYSFYSSLISYEEDQRQGA

SEQ ID NO: 966 - protein, 21 aa, Homo sapiens
ASRPYSFYSSLISYEEDQRQG

SEQ ID NO: 967 - protein, 21 aa, Homo sapiens
QASRPYSFYSSLISYEEDQRQ

SEQ ID NO: 968 - protein, 21 aa, Homo sapiens
NQASRPYSFYSSLISYEEDQR

SEQ ID NO: 969 - protein, 21 aa, Homo sapiens
RNQASRPYSFYSSLISYEEDQ

SEQ ID NO: 970 - protein, 21 aa, Homo sapiens
FRNQASRPYSFYSSLISYEED

SEQ ID NO: 971 - protein, 21 aa, Homo sapiens
TFRNQASRPYSFYSSLISYEE

SEQ ID NO: 972 - protein, 21 aa, Homo sapiens
VTFRNQASRPYSFYSSLISYE

SEQ ID NO: 973 - protein, 21 aa, Homo sapiens
MVTFRNQASRPYSFYSSLISY

SEQ ID NO: 974 - protein, 21 aa, Homo sapiens
IMVTFRNQASRPYSFYSSLIS

SEQ ID NO: 975 - protein, 21 aa, Homo sapiens
NIMVTFRNQASRPYSFYSSLI

SEQ ID NO: 976 - protein, 21 aa, Homo sapiens
DNIMVTFRNQASRPYSFYSSL

SEQ ID NO: 977 - protein, 21 aa, Homo sapiens
EDNIMVTFRNQASRPYSFYSS

SEQ ID NO: 978 - protein, 21 aa, Homo sapiens
VEDNIMVTFRNQASRPYSFYS

SEQ ID NO: 979 - protein, 21 aa, Homo sapiens
EVEDNIMVTFRNQASRPYSFY

SEQ ID NO: 980 - protein, 21 aa, Homo sapiens
DEFDCKAWAYFSDVDLEKDVH

SEQ ID NO: 981 - protein, 21 aa, Homo sapiens
KDEFDCKAWAYFSDVDLEKDV

SEQ ID NO: 982 - protein, 21 aa, Homo sapiens
TKDEFDCKAWAYFSDVDLEKD

SEQ ID NO: 983 - protein, 21 aa, Homo sapiens
PTKDEFDCKAWAYFSDVDLEK

SEQ ID NO: 984 - protein, 21 aa, Homo sapiens
APTKDEFDCKAWAYFSDVDLE

SEQ ID NO: 985 - protein, 21 aa, Homo sapiens
MAPTKDEFDCKAWAYFSDVDL

SEQ ID NO: 986 - protein, 21 aa, Homo sapiens
HMAPTKDEFDCKAWAYFSDVD

SEQ ID NO: 987 - protein, 21 aa, Homo sapiens
HHMAPTKDEFDCKAWAYFSDV

SEQ ID NO: 988 - protein, 21 aa, Homo sapiens
QHHMAPTKDEFDCKAWAYFSD

SEQ ID NO: 989 - protein, 21 aa, Homo sapiens
VQHHMAPTKDEFDCKAWAYFS

SEQ ID NO: 990 - protein, 21 aa, Homo sapiens
KVQHHMAPTKDEFDCKAWAYF

SEQ ID NO: 991 - protein, 21 aa, Homo sapiens
WKVQHHMAPTKDEFDCKAWAY

SEQ ID NO: 992 - protein, 21 aa, Homo sapiens
FWKVQHHMAPTKDEFDCKAWA

SEQ ID NO: 993 - protein, 21 aa, Homo sapiens
YFWKVQHHMAPTKDEFDCKAW

SEQ ID NO: 994 - protein, 21 aa, Homo sapiens
TYFWKVQHHMAPTKDEFDCKA

SEQ ID NO: 995 - protein, 21 aa, Homo sapiens
KTYFWKVQHHMAPTKDEFDCK

SEQ ID NO: 996 - protein, 21 aa, Homo sapiens
TKTYFWKVQHHMAPTKDEFDC

SEQ ID NO: 997 - protein, 21 aa, Homo sapiens
ETKTYFWKVQHHMAPTKDEFD

SEQ ID NO: 998 - protein, 21 aa, Homo sapiens
NETKTYFWKVQHHMAPTKDEF

SEQ ID NO: 999 - protein, 21 aa, Homo sapiens
PNETKTYFWKVQHHMAPTKDE

SEQ ID NO: 1000 - protein, 21 aa, Homo sapiens
KPNETKTYFWKVQHHMAPTKD

SEQ ID NO: 1001 - protein, 21 aa, Homo sapiens
PLLVCHTNTLNPAHGRQVTVQ

SEQ ID NO: 1002 - protein, 21 aa, Homo sapiens
GPLLVCHTNTLNPAHGRQVTV

SEQ ID NO: 1003 - protein, 21 aa, Homo sapiens
IGPLLVCHTNTLNPAHGRQVT

SEQ ID NO: 1004 - protein, 21 aa, Homo sapiens
LIGPLLVCHTNTLNPAHGRQV

SEQ ID NO: 1005 - protein, 21 aa, Homo sapiens
GLIGPLLVCHTNTLNPAHGRQ

SEQ ID NO: 1006 - protein, 21 aa, Homo sapiens
SGLIGPLLVCHTNTLNPAHGR

SEQ ID NO: 1007 - protein, 21 aa, Homo sapiens
HSGLIGPLLVCHTNTLNPAHG

SEQ ID NO: 1008 - protein, 21 aa, Homo sapiens
VHSGLIGPLLVCHTNTLNPAH

SEQ ID NO: 1009 - protein, 21 aa, Homo sapiens
DVHSGLIGPLLVCHTNTLNPA

SEQ ID NO: 1010 - protein, 21 aa, Homo sapiens
KDVHSGLIGPLLVCHTNTLNP

SEQ ID NO: 1011 - protein, 21 aa, Homo sapiens
EKDVHSGLIGPLLVCHTNTLN

SEQ ID NO: 1012 - protein, 21 aa, Homo sapiens
LEKDVHSGLIGPLLVCHTNTL

SEQ ID NO: 1013 - protein, 21 aa, Homo sapiens
DLEKDVHSGLIGPLLVCHTNT

SEQ ID NO: 1014 - protein, 21 aa, Homo sapiens
VDLEKDVHSGLIGPLLVCHTN

SEQ ID NO: 1015 - protein, 21 aa, Homo sapiens
DVDLEKDVHSGLIGPLLVCHT

SEQ ID NO: 1016 - protein, 21 aa, Homo sapiens
SDVDLEKDVHSGLIGPLLVCH

SEQ ID NO: 1017 - protein, 21 aa, Homo sapiens
FSDVDLEKDVHSGLIGPLLVC

SEQ ID NO: 1018 - protein, 21 aa, Homo sapiens
YFSDVDLEKDVHSGLIGPLLV

SEQ ID NO: 1019 - protein, 21 aa, Homo sapiens
AYFSDVDLEKDVHSGLIGPLL

SEQ ID NO: 1020 - protein, 21 aa, Homo sapiens
WAYFSDVDLEKDVHSGLIGPL

SEQ ID NO: 1021 - protein, 21 aa, Homo sapiens
AWAYFSDVDLEKDVHSGLIGP

SEQ ID NO: 1022 - protein, 21 aa, Homo sapiens
YFTENMERNCRAPCNIQMEDP

SEQ ID NO: 1023 - protein, 21 aa, Homo sapiens
WYFTENMERNCRAPCNIQMED

SEQ ID NO: 1024 - protein, 21 aa, Homo sapiens
SWYFTENMERNCRAPCNIQME

SEQ ID NO: 1025 - protein, 21 aa, Homo sapiens
KSWYFTENMERNCRAPCNIQM

SEQ ID NO: 1026 - protein, 21 aa, Homo sapiens
TKSWYFTENMERNCRAPCNIQ

SEQ ID NO: 1027 - protein, 21 aa, Homo sapiens
ETKSWYFTENMERNCRAPCNI

SEQ ID NO: 1028 - protein, 21 aa, Homo sapiens
DETKSWYFTENMERNCRAPCN

SEQ ID NO: 1029 - protein, 21 aa, Homo sapiens
FDETKSWYFTENMERNCRAPC

SEQ ID NO: 1030 - protein, 21 aa, Homo sapiens
IFDETKSWYFTENMERNCRAP

SEQ ID NO: 1031 - protein, 21 aa, Homo sapiens
TIFDETKSWYFTENMERNCRA

SEQ ID NO: 1032 - protein, 21 aa, Homo sapiens
FTIFDETKSWYFTENMERNCR

SEQ ID NO: 1033 - protein, 21 aa, Homo sapiens
FFTIFDETKSWYFTENMERNC

SEQ ID NO: 1034 - protein, 21 aa, Homo sapiens
LFFTIFDETKSWYFTENMERN

SEQ ID NO: 1035 - protein, 21 aa, Homo sapiens
ALFFTIFDETKSWYFTENMER

SEQ ID NO: 1036 - protein, 21 aa, Homo sapiens
FALFFTIFDETKSWYFTENME

SEQ ID NO: 1037 - protein, 21 aa, Homo sapiens
EFALFFTIFDETKSWYFTENM

SEQ ID NO: 1038 - protein, 21 aa, Homo sapiens
QEFALFFTIFDETKSWYFTEN

SEQ ID NO: 1039 - protein, 21 aa, Homo sapiens
VQEFALFFTIFDETKSWYFTE

SEQ ID NO: 1040 - protein, 21 aa, Homo sapiens
TVQEFALFFTIFDETKSWYFT

SEQ ID NO: 1041 - protein, 21 aa, Homo sapiens
VTVQEFALFFTIFDETKSWYF

SEQ ID NO: 1042 - protein, 21 aa, Homo sapiens
QVTVQEFALFFTIFDETKSWY

SEQ ID NO: 1043 - protein, 21 aa, Homo sapiens
AINGYIMDTLPGLVMAQDQRI

SEQ ID NO: 1044 - protein, 21 aa, Homo sapiens
HAINGYIMDTLPGLVMAQDQR

SEQ ID NO: 1045 - protein, 21 aa, Homo sapiens
FHAINGYIMDTLPGLVMAQDQ

SEQ ID NO: 1046 - protein, 21 aa, Homo sapiens
RFHAINGYIMDTLPGLVMAQD

SEQ ID NO: 1047 - protein, 21 aa, Homo sapiens
YRFHAINGYIMDTLPGLVMAQ

SEQ ID NO: 1048 - protein, 21 aa, Homo sapiens
NYRFHAINGYIMDTLPGLVMA

SEQ ID NO: 1049 - protein, 21 aa, Homo sapiens
ENYRFHAINGYIMDTLPGLVM

SEQ ID NO: 1050 - protein, 21 aa, Homo sapiens
KENYRFHAINGYIMDTLPGLV

SEQ ID NO: 1051 - protein, 21 aa, Homo sapiens
FKENYRFHAINGYIMDTLPGL

SEQ ID NO: 1052 - protein, 21 aa, Homo sapiens
TFKENYRFHAINGYIMDTLPG

SEQ ID NO: 1053 - protein, 21 aa, Homo sapiens
PTFKENYRFHAINGYIMDTLP

SEQ ID NO: 1054 - protein, 21 aa, Homo sapiens
DPTFKENYRFHAINGYIMDTL

SEQ ID NO: 1055 - protein, 21 aa, Homo sapiens
EDPTFKENYRFHAINGYIMDT

SEQ ID NO: 1056 - protein, 21 aa, Homo sapiens
MEDPTFKENYRFHAINGYIMD

SEQ ID NO: 1057 - protein, 21 aa, Homo sapiens
QMEDPTFKENYRFHAINGYIM

SEQ ID NO: 1058 - protein, 21 aa, Homo sapiens
IQMEDPTFKENYRFHAINGYI

SEQ ID NO: 1059 - protein, 21 aa, Homo sapiens
NIQMEDPTFKENYRFHAINGY

SEQ ID NO: 1060 - protein, 21 aa, Homo sapiens
CNIQMEDPTFKENYRFHAING

SEQ ID NO: 1061 - protein, 21 aa, Homo sapiens
PCNIQMEDPTFKENYRFHAIN

SEQ ID NO: 1062 - protein, 21 aa, Homo sapiens
APCNIQMEDPTFKENYRFHAI

SEQ ID NO: 1063 - protein, 21 aa, Homo sapiens
RAPCNIQMEDPTFKENYRFHA

SEQ ID NO: 1064 - protein, 21 aa, Homo sapiens
AINGYIMDTLPGLVMAQDQRI

SEQ ID NO: 1065 - protein, 21 aa, Homo sapiens
HAINGYIMDTLPGLVMAQDQR

SEQ ID NO: 1066 - protein, 21 aa, Homo sapiens
FHAINGYIMDTLPGLVMAQDQ

SEQ ID NO: 1067 - protein, 21 aa, Homo sapiens
RFHAINGYIMDTLPGLVMAQD

SEQ ID NO: 1068 - protein, 21 aa, Homo sapiens
YRFHAINGYIMDTLPGLVMAQ

SEQ ID NO: 1069 - protein, 21 aa, Homo sapiens
NYRFHAINGYIMDTLPGLVMA

SEQ ID NO: 1070 - protein, 21 aa, Homo sapiens
ENYRFHAINGYIMDTLPGLVM

SEQ ID NO: 1071 - protein, 21 aa, Homo sapiens
KENYRFHAINGYIMDTLPGLV

SEQ ID NO: 1072 - protein, 21 aa, Homo sapiens
FKENYRFHAINGYIMDTLPGL

SEQ ID NO: 1073 - protein, 21 aa, Homo sapiens
TFKENYRFHAINGYIMDTLPG

SEQ ID NO: 1074 - protein, 21 aa, Homo sapiens
PTFKENYRFHAINGYIMDTLP

SEQ ID NO: 1075 - protein, 21 aa, Homo sapiens
DPTFKENYRFHAINGYIMDTL

SEQ ID NO: 1076 - protein, 21 aa, Homo sapiens
EDPTFKENYRFHAINGYIMDT

SEQ ID NO: 1077 - protein, 21 aa, Homo sapiens
MEDPTFKENYRFHAINGYIMD

SEQ ID NO: 1078 - protein, 21 aa, Homo sapiens
QMEDPTFKENYRFHAINGYIM

SEQ ID NO: 1079 - protein, 21 aa, Homo sapiens
IQMEDPTFKENYRFHAINGYI

SEQ ID NO: 1080 - protein, 21 aa, Homo sapiens
NIQMEDPTFKENYRFHAINGY

SEQ ID NO: 1081 - protein, 21 aa, Homo sapiens
CNIQMEDPTFKENYRFHAING

SEQ ID NO: 1082 - protein, 21 aa, Homo sapiens
PCNIQMEDPTFKENYRFHAIN

SEQ ID NO: 1083 - protein, 21 aa, Homo sapiens
APCNIQMEDPTFKENYRFHAI

SEQ ID NO: 1084 - protein, 21 aa, Homo sapiens
RAPCNIQMEDPTFKENYRFHA

SEQ ID NO: 1085 - protein, 21 aa, Homo sapiens
NGYIMDTLPGLVMAQDQRIRW

SEQ ID NO: 1086 - protein, 21 aa, Homo sapiens
INGYIMDTLPGLVMAQDQRIR

SEQ ID NO: 1087 - protein, 21 aa, Homo sapiens
AINGYIMDTLPGLVMAQDQRI

SEQ ID NO: 1088 - protein, 21 aa, Homo sapiens
HAINGYIMDTLPGLVMAQDQR

SEQ ID NO: 1089 - protein, 21 aa, Homo sapiens
FHAINGYIMDTLPGLVMAQDQ

SEQ ID NO: 1090 - protein, 21 aa, Homo sapiens
RFHAINGYIMDTLPGLVMAQD

SEQ ID NO: 1091 - protein, 21 aa, Homo sapiens
YRFHAINGYIMDTLPGLVMAQ

SEQ ID NO: 1092 - protein, 21 aa, Homo sapiens
NYRFHAINGYIMDTLPGLVMA

SEQ ID NO: 1093 - protein, 21 aa, Homo sapiens
ENYRFHAINGYIMDTLPGLVM

SEQ ID NO: 1094 - protein, 21 aa, Homo sapiens
KENYRFHAINGYIMDTLPGLV

SEQ ID NO: 1095 - protein, 21 aa, Homo sapiens
FKENYRFHAINGYIMDTLPGL

SEQ ID NO: 1096 - protein, 21 aa, Homo sapiens
TFKENYRFHAINGYIMDTLPG

SEQ ID NO: 1097 - protein, 21 aa, Homo sapiens
PTFKENYRFHAINGYIMDTLP

SEQ ID NO: 1098 - protein, 21 aa, Homo sapiens
DPTFKENYRFHAINGYIMDTL

SEQ ID NO: 1099 - protein, 21 aa, Homo sapiens
EDPTFKENYRFHAINGYIMDT

SEQ ID NO: 1100 - protein, 21 aa, Homo sapiens
MEDPTFKENYRFHAINGYIMD

SEQ ID NO: 1101 - protein, 21 aa, Homo sapiens
QMEDPTFKENYRFHAINGYIM

SEQ ID NO: 1102 - protein, 21 aa, Homo sapiens
IQMEDPTFKENYRFHAINGYI

SEQ ID NO: 1103 - protein, 21 aa, Homo sapiens
NIQMEDPTFKENYRFHAINGY

SEQ ID NO: 1104 - protein, 21 aa, Homo sapiens
CNIQMEDPTFKENYRFHAING

SEQ ID NO: 1105 - protein, 21 aa, Homo sapiens
PCNIQMEDPTFKENYRFHAIN

SEQ ID NO: 1106 - protein, 21 aa, Homo sapiens
GYIMDTLPGLVMAQDQRIRWY

SEQ ID NO: 1107 - protein, 21 aa, Homo sapiens
NGYIMDTLPGLVMAQDQRIRW

SEQ ID NO: 1108 - protein, 21 aa, Homo sapiens
INGYIMDTLPGLVMAQDQRIR

SEQ ID NO: 1109 - protein, 21 aa, Homo sapiens
AINGYIMDTLPGLVMAQDQRI

SEQ ID NO: 1110 - protein, 21 aa, Homo sapiens
HAINGYIMDTLPGLVMAQDQR

SEQ ID NO: 1111 - protein, 21 aa, Homo sapiens
FHAINGYIMDTLPGLVMAQDQ

SEQ ID NO: 1112 - protein, 21 aa, Homo sapiens
RFHAINGYIMDTLPGLVMAQD

SEQ ID NO: 1113 - protein, 21 aa, Homo sapiens
YRFHAINGYIMDTLPGLVMAQ

SEQ ID NO: 1114 - protein, 21 aa, Homo sapiens
NYRFHAINGYIMDTLPGLVMA

SEQ ID NO: 1115 - protein, 21 aa, Homo sapiens
ENYRFHAINGYIMDTLPGLVM

SEQ ID NO: 1116 - protein, 21 aa, Homo sapiens
KENYRFHAINGYIMDTLPGLV

SEQ ID NO: 1117 - protein, 21 aa, Homo sapiens
FKENYRFHAINGYIMDTLPGL

SEQ ID NO: 1118 - protein, 21 aa, Homo sapiens
TFKENYRFHAINGYIMDTLPG

SEQ ID NO: 1119 - protein, 21 aa, Homo sapiens
PTFKENYRFHAINGYIMDTLP

SEQ ID NO: 1120 - protein, 21 aa, Homo sapiens
DPTFKENYRFHAINGYIMDTL

SEQ ID NO: 1121 - protein, 21 aa, Homo sapiens
EDPTFKENYRFHAINGYIMDT

SEQ ID NO: 1122 - protein, 21 aa, Homo sapiens
MEDPTFKENYRFHAINGYIMD

SEQ ID NO: 1123 - protein, 21 aa, Homo sapiens
QMEDPTFKENYRFHAINGYIM

SEQ ID NO: 1124 - protein, 21 aa, Homo sapiens
IQMEDPTFKENYRFHAINGYI

SEQ ID NO: 1125 - protein, 21 aa, Homo sapiens
NIQMEDPTFKENYRFHAINGY

SEQ ID NO: 1126 - protein, 21 aa, Homo sapiens
CNIQMEDPTFKENYRFHAING

SEQ ID NO: 1127 - protein, 21 aa, Homo sapiens
NIHSIHFSGHVFTVRKKEEYK

SEQ ID NO: 1128 - protein, 21 aa, Homo sapiens
ENIHSIHFSGHVFTVRKKEEY

SEQ ID NO: 1129 - protein, 21 aa, Homo sapiens
NENIHSIHFSGHVFTVRKKEE

SEQ ID NO: 1130 - protein, 21 aa, Homo sapiens
SNENIHSIHFSGHVFTVRKKE

SEQ ID NO: 1131 - protein, 21 aa, Homo sapiens
GSNENIHSIHFSGHVFTVRKK

SEQ ID NO: 1132 - protein, 21 aa, Homo sapiens
MGSNENIHSIHFSGHVFTVRK

SEQ ID NO: 1133 - protein, 21 aa, Homo sapiens
SMGSNENIHSIHFSGHVFTVR

SEQ ID NO: 1134 - protein, 21 aa, Homo sapiens
LSMGSNENIHSIHFSGHVFTV

SEQ ID NO: 1135 - protein, 21 aa, Homo sapiens
LLSMGSNENIHSIHFSGHVFT

SEQ ID NO: 1136 - protein, 21 aa, Homo sapiens
YLLSMGSNENIHSIHFSGHVF

SEQ ID NO: 1137 - protein, 21 aa, Homo sapiens
WYLLSMGSNENIHSIHFSGHV

SEQ ID NO: 1138 - protein, 21 aa, Homo sapiens
RWYLLSMGSNENIHSIHFSGH

SEQ ID NO: 1139 - protein, 21 aa, Homo sapiens
IRWYLLSMGSNENIHSIHFSG

SEQ ID NO: 1140 - protein, 21 aa, Homo sapiens
RIRWYLLSMGSNENIHSIHFS

SEQ ID NO: 1141 - protein, 21 aa, Homo sapiens
QRIRWYLLSMGSNENIHSIHF

SEQ ID NO: 1142 - protein, 21 aa, Homo sapiens
DQRIRWYLLSMGSNENIHSIH

SEQ ID NO: 1143 - protein, 21 aa, Homo sapiens
QDQRIRWYLLSMGSNENIHSI

SEQ ID NO: 1144 - protein, 21 aa, Homo sapiens
AQDQRIRWYLLSMGSNENIHS

SEQ ID NO: 1145 - protein, 21 aa, Homo sapiens
MAQDQRIRWYLLSMGSNENIH

SEQ ID NO: 1146 - protein, 21 aa, Homo sapiens
VMAQDQRIRWYLLSMGSNENI

SEQ ID NO: 1147 - protein, 21 aa, Homo sapiens
LVMAQDQRIRWYLLSMGSNEN

SEQ ID NO: 1148 - protein, 21 aa, Homo sapiens
GVFETVEMLPSKAGIWRVECL

SEQ ID NO: 1149 - protein, 21 aa, Homo sapiens
PGVFETVEMLPSKAGIWRVEC

SEQ ID NO: 1150 - protein, 21 aa, Homo sapiens
YPGVFETVEMLPSKAGIWRVE

SEQ ID NO: 1151 - protein, 21 aa, Homo sapiens
LYPGVFETVEMLPSKAGIWRV

SEQ ID NO: 1152 - protein, 21 aa, Homo sapiens
NLYPGVFETVEMLPSKAGIWR

SEQ ID NO: 1153 - protein, 21 aa, Homo sapiens
YNLYPGVFETVEMLPSKAGIW

SEQ ID NO: 1154 - protein, 21 aa, Homo sapiens
LYNLYPGVFETVEMLPSKAGI

SEQ ID NO: 1155 - protein, 21 aa, Homo sapiens
ALYNLYPGVFETVEMLPSKAG

SEQ ID NO: 1156 - protein, 21 aa, Homo sapiens
MALYNLYPGVFETVEMLPSKA

SEQ ID NO: 1157 - protein, 21 aa, Homo sapiens
KMALYNLYPGVFETVEMLPSK

SEQ ID NO: 1158 - protein, 21 aa, Homo sapiens
YKMALYNLYPGVFETVEMLPS

SEQ ID NO: 1159 - protein, 21 aa, Homo sapiens
EYKMALYNLYPGVFETVEMLP

SEQ ID NO: 1160 - protein, 21 aa, Homo sapiens
EEYKMALYNLYPGVFETVEML

SEQ ID NO: 1161 - protein, 21 aa, Homo sapiens
KEEYKMALYNLYPGVFETVEM

SEQ ID NO: 1162 - protein, 21 aa, Homo sapiens
KKEEYKMALYNLYPGVFETVE

SEQ ID NO: 1163 - protein, 21 aa, Homo sapiens
RKKEEYKMALYNLYPGVFETV

SEQ ID NO: 1164 - protein, 21 aa, Homo sapiens
VRKKEEYKMALYNLYPGVFET

SEQ ID NO: 1165 - protein, 21 aa, Homo sapiens
TVRKKEEYKMALYNLYPGVFE

SEQ ID NO: 1166 - protein, 21 aa, Homo sapiens
FTVRKKEEYKMALYNLYPGVF

SEQ ID NO: 1167 - protein, 21 aa, Homo sapiens
VFTVRKKEEYKMALYNLYPGV

SEQ ID NO: 1168 - protein, 21 aa, Homo sapiens
HVFTVRKKEEYKMALYNLYPG

SEQ ID NO: 1169 - protein, 21 aa, Homo sapiens
RVECLIGEHLHAGMSTLFLVY

SEQ ID NO: 1170 - protein, 21 aa, Homo sapiens
WRVECLIGEHLHAGMSTLFLV

SEQ ID NO: 1171 - protein, 21 aa, Homo sapiens
IWRVECLIGEHLHAGMSTLFL

SEQ ID NO: 1172 - protein, 21 aa, Homo sapiens
GIWRVECLIGEHLHAGMSTLF

SEQ ID NO: 1173 - protein, 21 aa, Homo sapiens
AGIWRVECLIGEHLHAGMSTL

SEQ ID NO: 1174 - protein, 21 aa, Homo sapiens
KAGIWRVECLIGEHLHAGMST

SEQ ID NO: 1175 - protein, 21 aa, Homo sapiens
SKAGIWRVECLIGEHLHAGMS

SEQ ID NO: 1176 - protein, 21 aa, Homo sapiens
PSKAGIWRVECLIGEHLHAGM

SEQ ID NO: 1177 - protein, 21 aa, Homo sapiens
LPSKAGIWRVECLIGEHLHAG

SEQ ID NO: 1178 - protein, 21 aa, Homo sapiens
MLPSKAGIWRVECLIGEHLHA

SEQ ID NO: 1179 - protein, 21 aa, Homo sapiens
EMLPSKAGIWRVECLIGEHLH

SEQ ID NO: 1180 - protein, 21 aa, Homo sapiens
VEMLPSKAGIWRVECLIGEHL

SEQ ID NO: 1181 - protein, 21 aa, Homo sapiens
TVEMLPSKAGIWRVECLIGEH

SEQ ID NO: 1182 - protein, 21 aa, Homo sapiens
ETVEMLPSKAGIWRVECLIGE

SEQ ID NO: 1183 - protein, 21 aa, Homo sapiens
FETVEMLPSKAGIWRVECLIG

SEQ ID NO: 1184 - protein, 21 aa, Homo sapiens
VFETVEMLPSKAGIWRVECLI

SEQ ID NO: 1185 - protein, 21 aa, Homo sapiens
GVFETVEMLPSKAGIWRVECL

SEQ ID NO: 1186 - protein, 21 aa, Homo sapiens
PGVFETVEMLPSKAGIWRVEC

SEQ ID NO: 1187 - protein, 21 aa, Homo sapiens
YPGVFETVEMLPSKAGIWRVE

SEQ ID NO: 1188 - protein, 21 aa, Homo sapiens
LYPGVFETVEMLPSKAGIWRV

SEQ ID NO: 1189 - protein, 21 aa, Homo sapiens
NLYPGVFETVEMLPSKAGIWR

SEQ ID NO: 1190 - protein, 21 aa, Homo sapiens
RVECLIGEHLHAGMSTLFLVY

SEQ ID NO: 1191 - protein, 21 aa, Homo sapiens
WRVECLIGEHLHAGMSTLFLV

SEQ ID NO: 1192 - protein, 21 aa, Homo sapiens
IWRVECLIGEHLHAGMSTLFL

SEQ ID NO: 1193 - protein, 21 aa, Homo sapiens
GIWRVECLIGEHLHAGMSTLF

SEQ ID NO: 1194 - protein, 21 aa, Homo sapiens
AGIWRVECLIGEHLHAGMSTL

SEQ ID NO: 1195 - protein, 21 aa, Homo sapiens
KAGIWRVECLIGEHLHAGMST

SEQ ID NO: 1196 - protein, 21 aa, Homo sapiens
SKAGIWRVECLIGEHLHAGMS

SEQ ID NO: 1197 - protein, 21 aa, Homo sapiens
PSKAGIWRVECLIGEHLHAGM

SEQ ID NO: 1198 - protein, 21 aa, Homo sapiens
LPSKAGIWRVECLIGEHLHAG

SEQ ID NO: 1199 - protein, 21 aa, Homo sapiens
MLPSKAGIWRVECLIGEHLHA

SEQ ID NO: 1200 - protein, 21 aa, Homo sapiens
EMLPSKAGIWRVECLIGEHLH

SEQ ID NO: 1201 - protein, 21 aa, Homo sapiens
VEMLPSKAGIWRVECLIGEHL

SEQ ID NO: 1202 - protein, 21 aa, Homo sapiens
TVEMLPSKAGIWRVECLIGEH

SEQ ID NO: 1203 - protein, 21 aa, Homo sapiens
ETVEMLPSKAGIWRVECLIGE

SEQ ID NO: 1204 - protein, 21 aa, Homo sapiens
FETVEMLPSKAGIWRVECLIG

SEQ ID NO: 1205 - protein, 21 aa, Homo sapiens
VFETVEMLPSKAGIWRVECLI

SEQ ID NO: 1206 - protein, 21 aa, Homo sapiens
GVFETVEMLPSKAGIWRVECL

SEQ ID NO: 1207 - protein, 21 aa, Homo sapiens
PGVFETVEMLPSKAGIWRVEC

SEQ ID NO: 1208 - protein, 21 aa, Homo sapiens
YPGVFETVEMLPSKAGIWRVE

SEQ ID NO: 1209 - protein, 21 aa, Homo sapiens
LYPGVFETVEMLPSKAGIWRV

SEQ ID NO: 1210 - protein, 21 aa, Homo sapiens
NLYPGVFETVEMLPSKAGIWR

SEQ ID NO: 1211 - protein, 21 aa, Homo sapiens
ECLIGEHLHAGMSTLFLVYSN

SEQ ID NO: 1212 - protein, 21 aa, Homo sapiens
VECLIGEHLHAGMSTLFLVYS

SEQ ID NO: 1213 - protein, 21 aa, Homo sapiens
RVECLIGEHLHAGMSTLFLVY

SEQ ID NO: 1214 - protein, 21 aa, Homo sapiens
WRVECLIGEHLHAGMSTLFLV

SEQ ID NO: 1215 - protein, 21 aa, Homo sapiens
IWRVECLIGEHLHAGMSTLFL

SEQ ID NO: 1216 - protein, 21 aa, Homo sapiens
GIWRVECLIGEHLHAGMSTLF

SEQ ID NO: 1217 - protein, 21 aa, Homo sapiens
AGIWRVECLIGEHLHAGMSTL

SEQ ID NO: 1218 - protein, 21 aa, Homo sapiens
KAGIWRVECLIGEHLHAGMST

SEQ ID NO: 1219 - protein, 21 aa, Homo sapiens
SKAGIWRVECLIGEHLHAGMS

SEQ ID NO: 1220 - protein, 21 aa, Homo sapiens
PSKAGIWRVECLIGEHLHAGM

SEQ ID NO: 1221 - protein, 21 aa, Homo sapiens
LPSKAGIWRVECLIGEHLHAG

SEQ ID NO: 1222 - protein, 21 aa, Homo sapiens
MLPSKAGIWRVECLIGEHLHA

SEQ ID NO: 1223 - protein, 21 aa, Homo sapiens
EMLPSKAGIWRVECLIGEHLH

SEQ ID NO: 1224 - protein, 21 aa, Homo sapiens
VEMLPSKAGIWRVECLIGEHL

SEQ ID NO: 1225 - protein, 21 aa, Homo sapiens
TVEMLPSKAGIWRVECLIGEH

SEQ ID NO: 1226 - protein, 21 aa, Homo sapiens
ETVEMLPSKAGIWRVECLIGE

SEQ ID NO: 1227 - protein, 21 aa, Homo sapiens
FETVEMLPSKAGIWRVECLIG

SEQ ID NO: 1228 - protein, 21 aa, Homo sapiens
VFETVEMLPSKAGIWRVECLI

SEQ ID NO: 1229 - protein, 21 aa, Homo sapiens
GVFETVEMLPSKAGIWRVECL

SEQ ID NO: 1230 - protein, 21 aa, Homo sapiens
PGVFETVEMLPSKAGIWRVEC

SEQ ID NO: 1231 - protein, 21 aa, Homo sapiens
YPGVFETVEMLPSKAGIWRVE

SEQ ID NO: 1232 - protein, 21 aa, Homo sapiens
EHLHAGMSTLFLVYSNKCQTP

SEQ ID NO: 1233 - protein, 21 aa, Homo sapiens
GEHLHAGMSTLFLVYSNKCQT

SEQ ID NO: 1234 - protein, 21 aa, Homo sapiens
IGEHLHAGMSTLFLVYSNKCQ

SEQ ID NO: 1235 - protein, 21 aa, Homo sapiens
LIGEHLHAGMSTLFLVYSNKC

SEQ ID NO: 1236 - protein, 21 aa, Homo sapiens
CLIGEHLHAGMSTLFLVYSNK

SEQ ID NO: 1237 - protein, 21 aa, Homo sapiens
ECLIGEHLHAGMSTLFLVYSN

SEQ ID NO: 1238 - protein, 21 aa, Homo sapiens
VECLIGEHLHAGMSTLFLVYS

SEQ ID NO: 1239 - protein, 21 aa, Homo sapiens
RVECLIGEHLHAGMSTLFLVY

SEQ ID NO: 1240 - protein, 21 aa, Homo sapiens
WRVECLIGEHLHAGMSTLFLV

SEQ ID NO: 1241 - protein, 21 aa, Homo sapiens
IWRVECLIGEHLHAGMSTLFL

SEQ ID NO: 1242 - protein, 21 aa, Homo sapiens
GIWRVECLIGEHLHAGMSTLF

SEQ ID NO: 1243 - protein, 21 aa, Homo sapiens
AGIWRVECLIGEHLHAGMSTL

SEQ ID NO: 1244 - protein, 21 aa, Homo sapiens
KAGIWRVECLIGEHLHAGMST

SEQ ID NO: 1245 - protein, 21 aa, Homo sapiens
SKAGIWRVECLIGEHLHAGMS

SEQ ID NO: 1246 - protein, 21 aa, Homo sapiens
PSKAGIWRVECLIGEHLHAGM

SEQ ID NO: 1247 - protein, 21 aa, Homo sapiens
LPSKAGIWRVECLIGEHLHAG

SEQ ID NO: 1248 - protein, 21 aa, Homo sapiens
MLPSKAGIWRVECLIGEHLHA

SEQ ID NO: 1249 - protein, 21 aa, Homo sapiens
EMLPSKAGIWRVECLIGEHLH

SEQ ID NO: 1250 - protein, 21 aa, Homo sapiens
VEMLPSKAGIWRVECLIGEHL

SEQ ID NO: 1251 - protein, 21 aa, Homo sapiens
TVEMLPSKAGIWRVECLIGEH

SEQ ID NO: 1252 - protein, 21 aa, Homo sapiens
ETVEMLPSKAGIWRVECLIGE

SEQ ID NO: 1253 - protein, 21 aa, Homo sapiens
GMSTLFLVYSNKCQTPLGMAS

SEQ ID NO: 1254 - protein, 21 aa, Homo sapiens
AGMSTLFLVYSNKCQTPLGMA

SEQ ID NO: 1255 - protein, 21 aa, Homo sapiens
HAGMSTLFLVYSNKCQTPLGM

SEQ ID NO: 1256 - protein, 21 aa, Homo sapiens
LHAGMSTLFLVYSNKCQTPLG

SEQ ID NO: 1257 - protein, 21 aa, Homo sapiens
HLHAGMSTLFLVYSNKCQTPL

SEQ ID NO: 1258 - protein, 21 aa, Homo sapiens
EHLHAGMSTLFLVYSNKCQTP

SEQ ID NO: 1259 - protein, 21 aa, Homo sapiens
GEHLHAGMSTLFLVYSNKCQT

SEQ ID NO: 1260 - protein, 21 aa, Homo sapiens
IGEHLHAGMSTLFLVYSNKCQ

SEQ ID NO: 1261 - protein, 21 aa, Homo sapiens
LIGEHLHAGMSTLFLVYSNKC

SEQ ID NO: 1262 - protein, 21 aa, Homo sapiens
CLIGEHLHAGMSTLFLVYSNK

SEQ ID NO: 1263 - protein, 21 aa, Homo sapiens
ECLIGEHLHAGMSTLFLVYSN

SEQ ID NO: 1264 - protein, 21 aa, Homo sapiens
VECLIGEHLHAGMSTLFLVYS

SEQ ID NO: 1265 - protein, 21 aa, Homo sapiens
RVECLIGEHLHAGMSTLFLVY

SEQ ID NO: 1266 - protein, 21 aa, Homo sapiens
WRVECLIGEHLHAGMSTLFLV

SEQ ID NO: 1267 - protein, 21 aa, Homo sapiens
IWRVECLIGEHLHAGMSTLFL

SEQ ID NO: 1268 - protein, 21 aa, Homo sapiens
GIWRVECLIGEHLHAGMSTLF

SEQ ID NO: 1269 - protein, 21 aa, Homo sapiens
AGIWRVECLIGEHLHAGMSTL

SEQ ID NO: 1270 - protein, 21 aa, Homo sapiens
KAGIWRVECLIGEHLHAGMST

SEQ ID NO: 1271 - protein, 21 aa, Homo sapiens
SKAGIWRVECLIGEHLHAGMS

SEQ ID NO: 1272 - protein, 21 aa, Homo sapiens
PSKAGIWRVECLIGEHLHAGM

SEQ ID NO: 1273 - protein, 21 aa, Homo sapiens
LPSKAGIWRVECLIGEHLHAG

SEQ ID NO: 1274 - protein, 21 aa, Homo sapiens
VYSNKCQTPLGMASGHIRDFQ

SEQ ID NO: 1275 - protein, 21 aa, Homo sapiens
LVYSNKCQTPLGMASGHIRDF

SEQ ID NO: 1276 - protein, 21 aa, Homo sapiens
FLVYSNKCQTPLGMASGHIRD

SEQ ID NO: 1277 - protein, 21 aa, Homo sapiens
LFLVYSNKCQTPLGMASGHIR

SEQ ID NO: 1278 - protein, 21 aa, Homo sapiens
TLFLVYSNKCQTPLGMASGHI

SEQ ID NO: 1279 - protein, 21 aa, Homo sapiens
STLFLVYSNKCQTPLGMASGH

SEQ ID NO: 1280 - protein, 21 aa, Homo sapiens
MSTLFLVYSNKCQTPLGMASG

SEQ ID NO: 1281 - protein, 21 aa, Homo sapiens
GMSTLFLVYSNKCQTPLGMAS

SEQ ID NO: 1282 - protein, 21 aa, Homo sapiens
AGMSTLFLVYSNKCQTPLGMA

SEQ ID NO: 1283 - protein, 21 aa, Homo sapiens
HAGMSTLFLVYSNKCQTPLGM

SEQ ID NO: 1284 - protein, 21 aa, Homo sapiens
LHAGMSTLFLVYSNKCQTPLG

SEQ ID NO: 1285 - protein, 21 aa, Homo sapiens
HLHAGMSTLFLVYSNKCQTPL

SEQ ID NO: 1286 - protein, 21 aa, Homo sapiens
EHLHAGMSTLFLVYSNKCQTP

SEQ ID NO: 1287 - protein, 21 aa, Homo sapiens
GEHLHAGMSTLFLVYSNKCQT

SEQ ID NO: 1288 - protein, 21 aa, Homo sapiens
IGEHLHAGMSTLFLVYSNKCQ

SEQ ID NO: 1289 - protein, 21 aa, Homo sapiens
LIGEHLHAGMSTLFLVYSNKC

SEQ ID NO: 1290 - protein, 21 aa, Homo sapiens
CLIGEHLHAGMSTLFLVYSNK

SEQ ID NO: 1291 - protein, 21 aa, Homo sapiens
ECLIGEHLHAGMSTLFLVYSN

SEQ ID NO: 1292 - protein, 21 aa, Homo sapiens
VECLIGEHLHAGMSTLFLVYS

SEQ ID NO: 1293 - protein, 21 aa, Homo sapiens
RVECLIGEHLHAGMSTLFLVY

SEQ ID NO: 1294 - protein, 21 aa, Homo sapiens
WRVECLIGEHLHAGMSTLFLV

SEQ ID NO: 1295 - protein, 21 aa, Homo sapiens
ASGQYGQWAPKLARLHYSGSI

SEQ ID NO: 1296 - protein, 21 aa, Homo sapiens
TASGQYGQWAPKLARLHYSGS

SEQ ID NO: 1297 - protein, 21 aa, Homo sapiens
ITASGQYGQWAPKLARLHYSG

SEQ ID NO: 1298 - protein, 21 aa, Homo sapiens
QITASGQYGQWAPKLARLHYS

SEQ ID NO: 1299 - protein, 21 aa, Homo sapiens
FQITASGQYGQWAPKLARLHY

SEQ ID NO: 1300 - protein, 21 aa, Homo sapiens
DFQITASGQYGQWAPKLARLH

SEQ ID NO: 1301 - protein, 21 aa, Homo sapiens
RDFQITASGQYGQWAPKLARL

SEQ ID NO: 1302 - protein, 21 aa, Homo sapiens
IRDFQITASGQYGQWAPKLAR

SEQ ID NO: 1303 - protein, 21 aa, Homo sapiens
HIRDFQITASGQYGQWAPKLA

SEQ ID NO: 1304 - protein, 21 aa, Homo sapiens
GHIRDFQITASGQYGQWAPKL

SEQ ID NO: 1305 - protein, 21 aa, Homo sapiens
SGHIRDFQITASGQYGQWAPK

SEQ ID NO: 1306 - protein, 21 aa, Homo sapiens
ASGHIRDFQITASGQYGQWAP

SEQ ID NO: 1307 - protein, 21 aa, Homo sapiens
MASGHIRDFQITASGQYGQWA

SEQ ID NO: 1308 - protein, 21 aa, Homo sapiens
GMASGHIRDFQITASGQYGQW

SEQ ID NO: 1309 - protein, 21 aa, Homo sapiens
LGMASGHIRDFQITASGQYGQ

SEQ ID NO: 1310 - protein, 21 aa, Homo sapiens
PLGMASGHIRDFQITASGQYG

SEQ ID NO: 1311 - protein, 21 aa, Homo sapiens
TPLGMASGHIRDFQITASGQY

SEQ ID NO: 1312 - protein, 21 aa, Homo sapiens
QTPLGMASGHIRDFQITASGQ

SEQ ID NO: 1313 - protein, 21 aa, Homo sapiens
CQTPLGMASGHIRDFQITASG

SEQ ID NO: 1314 - protein, 21 aa, Homo sapiens
KCQTPLGMASGHIRDFQITAS

SEQ ID NO: 1315 - protein, 21 aa, Homo sapiens
NKCQTPLGMASGHIRDFQITA

SEQ ID NO: 1316 - protein, 21 aa, Homo sapiens
WSTKEPFSWIKVDLLAPMIIH

SEQ ID NO: 1317 - protein, 21 aa, Homo sapiens
AWSTKEPFSWIKVDLLAPMII

SEQ ID NO: 1318 - protein, 21 aa, Homo sapiens
NAWSTKEPFSWIKVDLLAPMI

SEQ ID NO: 1319 - protein, 21 aa, Homo sapiens
INAWSTKEPFSWIKVDLLAPM

SEQ ID NO: 1320 - protein, 21 aa, Homo sapiens
SINAWSTKEPFSWIKVDLLAP

SEQ ID NO: 1321 - protein, 21 aa, Homo sapiens
GSINAWSTKEPFSWIKVDLLA

SEQ ID NO: 1322 - protein, 21 aa, Homo sapiens
SGSINAWSTKEPFSWIKVDLL

SEQ ID NO: 1323 - protein, 21 aa, Homo sapiens
YSGSINAWSTKEPFSWIKVDL

SEQ ID NO: 1324 - protein, 21 aa, Homo sapiens
HYSGSINAWSTKEPFSWIKVD

SEQ ID NO: 1325 - protein, 21 aa, Homo sapiens
LHYSGSINAWSTKEPFSWIKV

SEQ ID NO: 1326 - protein, 21 aa, Homo sapiens
RLHYSGSINAWSTKEPFSWIK

SEQ ID NO: 1327 - protein, 21 aa, Homo sapiens
ARLHYSGSINAWSTKEPFSWI

SEQ ID NO: 1328 - protein, 21 aa, Homo sapiens
LARLHYSGSINAWSTKEPFSW

SEQ ID NO: 1329 - protein, 21 aa, Homo sapiens
KLARLHYSGSINAWSTKEPFS

SEQ ID NO: 1330 - protein, 21 aa, Homo sapiens
PKLARLHYSGSINAWSTKEPF

SEQ ID NO: 1331 - protein, 21 aa, Homo sapiens
APKLARLHYSGSINAWSTKEP

SEQ ID NO: 1332 - protein, 21 aa, Homo sapiens
WAPKLARLHYSGSINAWSTKE

SEQ ID NO: 1333 - protein, 21 aa, Homo sapiens
QWAPKLARLHYSGSINAWSTK

SEQ ID NO: 1334 - protein, 21 aa, Homo sapiens
GQWAPKLARLHYSGSINAWST

SEQ ID NO: 1335 - protein, 21 aa, Homo sapiens
YGQWAPKLARLHYSGSINAWS

SEQ ID NO: 1336 - protein, 21 aa, Homo sapiens
QYGQWAPKLARLHYSGSINAW

SEQ ID NO: 1337 - protein, 21 aa, Homo sapiens
DLLAPMIIHGIKTQGARQKFS

SEQ ID NO: 1338 - protein, 21 aa, Homo sapiens
VDLLAPMIIHGIKTQGARQKF

SEQ ID NO: 1339 - protein, 21 aa, Homo sapiens
KVDLLAPMIIHGIKTQGARQK

SEQ ID NO: 1340 - protein, 21 aa, Homo sapiens
IKVDLLAPMIIHGIKTQGARQ

SEQ ID NO: 1341 - protein, 21 aa, Homo sapiens
WIKVDLLAPMIIHGIKTQGAR

SEQ ID NO: 1342 - protein, 21 aa, Homo sapiens
SWIKVDLLAPMIIHGIKTQGA

SEQ ID NO: 1343 - protein, 21 aa, Homo sapiens
FSWIKVDLLAPMIIHGIKTQG

SEQ ID NO: 1344 - protein, 21 aa, Homo sapiens
PFSWIKVDLLAPMIIHGIKTQ

SEQ ID NO: 1345 - protein, 21 aa, Homo sapiens
EPFSWIKVDLLAPMIIHGIKT

SEQ ID NO: 1346 - protein, 21 aa, Homo sapiens
KEPFSWIKVDLLAPMIIHGIK

SEQ ID NO: 1347 - protein, 21 aa, Homo sapiens
TKEPFSWIKVDLLAPMIIHGI

SEQ ID NO: 1348 - protein, 21 aa, Homo sapiens
STKEPFSWIKVDLLAPMIIHG

SEQ ID NO: 1349 - protein, 21 aa, Homo sapiens
WSTKEPFSWIKVDLLAPMIIH

SEQ ID NO: 1350 - protein, 21 aa, Homo sapiens
AWSTKEPFSWIKVDLLAPMII

SEQ ID NO: 1351 - protein, 21 aa, Homo sapiens
NAWSTKEPFSWIKVDLLAPMI

SEQ ID NO: 1352 - protein, 21 aa, Homo sapiens
INAWSTKEPFSWIKVDLLAPM

SEQ ID NO: 1353 - protein, 21 aa, Homo sapiens
SINAWSTKEPFSWIKVDLLAP

SEQ ID NO: 1354 - protein, 21 aa, Homo sapiens
GSINAWSTKEPFSWIKVDLLA

SEQ ID NO: 1355 - protein, 21 aa, Homo sapiens
SGSINAWSTKEPFSWIKVDLL

SEQ ID NO: 1356 - protein, 21 aa, Homo sapiens
YSGSINAWSTKEPFSWIKVDL

SEQ ID NO: 1357 - protein, 21 aa, Homo sapiens
HYSGSINAWSTKEPFSWIKVD

SEQ ID NO: 1358 - protein, 21 aa, Homo sapiens
GIKTQGARQKFSSLYISQFII

SEQ ID NO: 1359 - protein, 21 aa, Homo sapiens
HGIKTQGARQKFSSLYISQFI

SEQ ID NO: 1360 - protein, 21 aa, Homo sapiens
IHGIKTQGARQKFSSLYISQF

SEQ ID NO: 1361 - protein, 21 aa, Homo sapiens
IIHGIKTQGARQKFSSLYISQ

SEQ ID NO: 1362 - protein, 21 aa, Homo sapiens
MIIHGIKTQGARQKFSSLYIS

SEQ ID NO: 1363 - protein, 21 aa, Homo sapiens
PMIIHGIKTQGARQKFSSLYI

SEQ ID NO: 1364 - protein, 21 aa, Homo sapiens
APMIIHGIKTQGARQKFSSLY

SEQ ID NO: 1365 - protein, 21 aa, Homo sapiens
LAPMIIHGIKTQGARQKFSSL

SEQ ID NO: 1366 - protein, 21 aa, Homo sapiens
LLAPMIIHGIKTQGARQKFSS

SEQ ID NO: 1367 - protein, 21 aa, Homo sapiens
DLLAPMIIHGIKTQGARQKFS

SEQ ID NO: 1368 - protein, 21 aa, Homo sapiens
VDLLAPMIIHGIKTQGARQKF

SEQ ID NO: 1369 - protein, 21 aa, Homo sapiens
KVDLLAPMIIHGIKTQGARQK

SEQ ID NO: 1370 - protein, 21 aa, Homo sapiens
IKVDLLAPMIIHGIKTQGARQ

SEQ ID NO: 1371 - protein, 21 aa, Homo sapiens
WIKVDLLAPMIIHGIKTQGAR

SEQ ID NO: 1372 - protein, 21 aa, Homo sapiens
SWIKVDLLAPMIIHGIKTQGA

SEQ ID NO: 1373 - protein, 21 aa, Homo sapiens
FSWIKVDLLAPMIIHGIKTQG

SEQ ID NO: 1374 - protein, 21 aa, Homo sapiens
PFSWIKVDLLAPMIIHGIKTQ

SEQ ID NO: 1375 - protein, 21 aa, Homo sapiens
EPFSWIKVDLLAPMIIHGIKT

SEQ ID NO: 1376 - protein, 21 aa, Homo sapiens
KEPFSWIKVDLLAPMIIHGIK

SEQ ID NO: 1377 - protein, 21 aa, Homo sapiens
TKEPFSWIKVDLLAPMIIHGI

SEQ ID NO: 1378 - protein, 21 aa, Homo sapiens
STKEPFSWIKVDLLAPMIIHG

SEQ ID NO: 1379 - protein, 21 aa, Homo sapiens
TQGARQKFSSLYISQFIIMYS

SEQ ID NO: 1380 - protein, 21 aa, Homo sapiens
KTQGARQKFSSLYISQFIIMY

SEQ ID NO: 1381 - protein, 21 aa, Homo sapiens
IKTQGARQKFSSLYISQFIIM

SEQ ID NO: 1382 - protein, 21 aa, Homo sapiens
GIKTQGARQKFSSLYISQFII

SEQ ID NO: 1383 - protein, 21 aa, Homo sapiens
HGIKTQGARQKFSSLYISQFI

SEQ ID NO: 1384 - protein, 21 aa, Homo sapiens
IHGIKTQGARQKFSSLYISQF

SEQ ID NO: 1385 - protein, 21 aa, Homo sapiens
IIHGIKTQGARQKFSSLYISQ

SEQ ID NO: 1386 - protein, 21 aa, Homo sapiens
MIIHGIKTQGARQKFSSLYIS

SEQ ID NO: 1387 - protein, 21 aa, Homo sapiens
PMIIHGIKTQGARQKFSSLYI

SEQ ID NO: 1388 - protein, 21 aa, Homo sapiens
APMIIHGIKTQGARQKFSSLY

SEQ ID NO: 1389 - protein, 21 aa, Homo sapiens
LAPMIIHGIKTQGARQKFSSL

SEQ ID NO: 1390 - protein, 21 aa, Homo sapiens
LLAPMIIHGIKTQGARQKFSS

SEQ ID NO: 1391 - protein, 21 aa, Homo sapiens
DLLAPMIIHGIKTQGARQKFS

SEQ ID NO: 1392 - protein, 21 aa, Homo sapiens
VDLLAPMIIHGIKTQGARQKF

SEQ ID NO: 1393 - protein, 21 aa, Homo sapiens
VDLLAPMIIHGIKTQGARQKF

SEQ ID NO: 1394 - protein, 21 aa, Homo sapiens
IKVDLLAPMIIHGIKTQGARQ

SEQ ID NO: 1395 - protein, 21 aa, Homo sapiens
WIKVDLLAPMIIHGIKTQGAR

SEQ ID NO: 1396 - protein, 21 aa, Homo sapiens
SWIKVDLLAPMIIHGIKTQGA

SEQ ID NO: 1397 - protein, 21 aa, Homo sapiens
FSWIKVDLLAPMIIHGIKTQG

SEQ ID NO: 1398 - protein, 21 aa, Homo sapiens
PFSWIKVDLLAPMIIHGIKTQ

SEQ ID NO: 1399 - protein, 21 aa, Homo sapiens
EPFSWIKVDLLAPMIIHGIKT

SEQ ID NO: 1400 - protein, 21 aa, Homo sapiens
YSLDGKKWQTYRGNSTGTLMV

SEQ ID NO: 1401 - protein, 21 aa, Homo sapiens
MYSLDGKKWQTYRGNSTGTLM

SEQ ID NO: 1402 - protein, 21 aa, Homo sapiens
IMYSLDGKKWQTYRGNSTGTL

SEQ ID NO: 1403 - protein, 21 aa, Homo sapiens
IIMYSLDGKKWQTYRGNSTGT

SEQ ID NO: 1404 - protein, 21 aa, Homo sapiens
FIIMYSLDGKKWQTYRGNSTG

SEQ ID NO: 1405 - protein, 21 aa, Homo sapiens
QFIIMYSLDGKKWQTYRGNST

SEQ ID NO: 1406 - protein, 21 aa, Homo sapiens
SQFIIMYSLDGKKWQTYRGNS

SEQ ID NO: 1407 - protein, 21 aa, Homo sapiens
ISQFIIMYSLDGKKWQTYRGN

SEQ ID NO: 1408 - protein, 21 aa, Homo sapiens
YISQFIIMYSLDGKKWQTYRG

SEQ ID NO: 1409 - protein, 21 aa, Homo sapiens
LYISQFIIMYSLDGKKWQTYR

SEQ ID NO: 1410 - protein, 21 aa, Homo sapiens
SLYISQFIIMYSLDGKKWQTY

SEQ ID NO: 1411 - protein, 21 aa, Homo sapiens
SSLYISQFIIMYSLDGKKWQT

SEQ ID NO: 1412 - protein, 21 aa, Homo sapiens
FSSLYISQFIIMYSLDGKKWQ

SEQ ID NO: 1413 - protein, 21 aa, Homo sapiens
KFSSLYISQFIIMYSLDGKKW

SEQ ID NO: 1414 - protein, 21 aa, Homo sapiens
QKFSSLYISQFIIMYSLDGKK

SEQ ID NO: 1415 - protein, 21 aa, Homo sapiens
RQKFSSLYISQFIIMYSLDGK

SEQ ID NO: 1416 - protein, 21 aa, Homo sapiens
ARQKFSSLYISQFIIMYSLDG

SEQ ID NO: 1417 - protein, 21 aa, Homo sapiens
GARQKFSSLYISQFIIMYSLD

SEQ ID NO: 1418 - protein, 21 aa, Homo sapiens
QGARQKFSSLYISQFIIMYSL

SEQ ID NO: 1419 - protein, 21 aa, Homo sapiens
TQGARQKFSSLYISQFIIMYS

SEQ ID NO: 1420 - protein, 21 aa, Homo sapiens
KTQGARQKFSSLYISQFIIMY

SEQ ID NO: 1421 - protein, 21 aa, Homo sapiens
NVDSSGIKHNIFNPPIIARYI

SEQ ID NO: 1422 - protein, 21 aa, Homo sapiens
GNVDSSGIKHNIFNPPIIARY

SEQ ID NO: 1423 - protein, 21 aa, Homo sapiens
FGNVDSSGIKHNIFNPPIIAR

SEQ ID NO: 1424 - protein, 21 aa, Homo sapiens
FFGNVDSSGIKHNIFNPPIIA

SEQ ID NO: 1425 - protein, 21 aa, Homo sapiens
VFFGNVDSSGIKHNIFNPPII

SEQ ID NO: 1426 - protein, 21 aa, Homo sapiens
MVFFGNVDSSGIKHNIFNPPI

SEQ ID NO: 1427 - protein, 21 aa, Homo sapiens
LMVFFGNVDSSGIKHNIFNPP

SEQ ID NO: 1428 - protein, 21 aa, Homo sapiens
TLMVFFGNVDSSGIKHNIFNP

SEQ ID NO: 1429 - protein, 21 aa, Homo sapiens
GTLMVFFGNVDSSGIKHNIFN

SEQ ID NO: 1430 - protein, 21 aa, Homo sapiens
TGTLMVFFGNVDSSGIKHNIF

SEQ ID NO: 1431 - protein, 21 aa, Homo sapiens
STGTLMVFFGNVDSSGIKHNI

SEQ ID NO: 1432 - protein, 21 aa, Homo sapiens
NSTGTLMVFFGNVDSSGIKHN

SEQ ID NO: 1433 - protein, 21 aa, Homo sapiens
GNSTGTLMVFFGNVDSSGIKH

SEQ ID NO: 1434 - protein, 21 aa, Homo sapiens
RGNSTGTLMVFFGNVDSSGIK

SEQ ID NO: 1435 - protein, 21 aa, Homo sapiens
YRGNSTGTLMVFFGNVDSSGI

SEQ ID NO: 1436 - protein, 21 aa, Homo sapiens
TYRGNSTGTLMVFFGNVDSSG

SEQ ID NO: 1437 - protein, 21 aa, Homo sapiens
QTYRGNSTGTLMVFFGNVDSS

SEQ ID NO: 1438 - protein, 21 aa, Homo sapiens
WQTYRGNSTGTLMVFFGNVDS

SEQ ID NO: 1439 - protein, 21 aa, Homo sapiens
KWQTYRGNSTGTLMVFFGNVD

SEQ ID NO: 1440 - protein, 21 aa, Homo sapiens
KKWQTYRGNSTGTLMVFFGNV

SEQ ID NO: 1441 - protein, 21 aa, Homo sapiens
GKKWQTYRGNSTGTLMVFFGN

SEQ ID NO: 1442 - protein, 21 aa, Homo sapiens
RLHPTHYSIRSTLRMELMGCD

SEQ ID NO: 1443 - protein, 21 aa, Homo sapiens
IRLHPTHYSIRSTLRMELMGC

SEQ ID NO: 1444 - protein, 21 aa, Homo sapiens
YIRLHPTHYSIRSTLRMELMG

SEQ ID NO: 1445 - protein, 21 aa, Homo sapiens
RYIRLHPTHYSIRSTLRMELM

SEQ ID NO: 1446 - protein, 21 aa, Homo sapiens
ARYIRLHPTHYSIRSTLRMEL

SEQ ID NO: 1447 - protein, 21 aa, Homo sapiens
IARYIRLHPTHYSIRSTLRME

SEQ ID NO: 1448 - protein, 21 aa, Homo sapiens
IIARYIRLHPTHYSIRSTLRM

SEQ ID NO: 1449 - protein, 21 aa, Homo sapiens
PIIARYIRLHPTHYSIRSTLR

SEQ ID NO: 1450 - protein, 21 aa, Homo sapiens
PPIIARYIRLHPTHYSIRSTL

SEQ ID NO: 1451 - protein, 21 aa, Homo sapiens
NPPIIARYIRLHPTHYSIRST

SEQ ID NO: 1452 - protein, 21 aa, Homo sapiens
FNPPIIARYIRLHPTHYSIRS

SEQ ID NO: 1453 - protein, 21 aa, Homo sapiens
IFNPPIIARYIRLHPTHYSIR

SEQ ID NO: 1454 - protein, 21 aa, Homo sapiens
NIFNPPIIARYIRLHPTHYSI

SEQ ID NO: 1455 - protein, 21 aa, Homo sapiens
HNIFNPPIIARYIRLHPTHYS

SEQ ID NO: 1456 - protein, 21 aa, Homo sapiens
KHNIFNPPIIARYIRLHPTHY

SEQ ID NO: 1457 - protein, 21 aa, Homo sapiens
IKHNIFNPPIIARYIRLHPTH

SEQ ID NO: 1458 - protein, 21 aa, Homo sapiens
GIKHNIFNPPIIARYIRLHPT

SEQ ID NO: 1459 - protein, 21 aa, Homo sapiens
SGIKHNIFNPPIIARYIRLHP

SEQ ID NO: 1460 - protein, 21 aa, Homo sapiens
SSGIKHNIFNPPIIARYIRLH

SEQ ID NO: 1461 - protein, 21 aa, Homo sapiens
DSSGIKHNIFNPPIIARYIRL

SEQ ID NO: 1462 - protein, 21 aa, Homo sapiens
VDSSGIKHNIFNPPIIARYIR

SEQ ID NO: 1463 - protein, 21 aa, Homo sapiens
RSTLRMELMGCDLNSCSMPLG

SEQ ID NO: 1464 - protein, 21 aa, Homo sapiens
IRSTLRMELMGCDLNSCSMPL

SEQ ID NO: 1465 - protein, 21 aa, Homo sapiens
SIRSTLRMELMGCDLNSCSMP

SEQ ID NO: 1466 - protein, 21 aa, Homo sapiens
YSIRSTLRMELMGCDLNSCSM

SEQ ID NO: 1467 - protein, 21 aa, Homo sapiens
HYSIRSTLRMELMGCDLNSCS

SEQ ID NO: 1468 - protein, 21 aa, Homo sapiens
THYSIRSTLRMELMGCDLNSC

SEQ ID NO: 1469 - protein, 21 aa, Homo sapiens
PTHYSIRSTLRMELMGCDLNS

SEQ ID NO: 1470 - protein, 21 aa, Homo sapiens
HPTHYSIRSTLRMELMGCDLN

SEQ ID NO: 1471 - protein, 21 aa, Homo sapiens
LHPTHYSIRSTLRMELMGCDL

SEQ ID NO: 1472 - protein, 21 aa, Homo sapiens
RLHPTHYSIRSTLRMELMGCD

SEQ ID NO: 1473 - protein, 21 aa, Homo sapiens
IRLHPTHYSIRSTLRMELMGC

SEQ ID NO: 1474 - protein, 21 aa, Homo sapiens
YIRLHPTHYSIRSTLRMELMG

SEQ ID NO: 1475 - protein, 21 aa, Homo sapiens
RYIRLHPTHYSIRSTLRMELM

SEQ ID NO: 1476 - protein, 21 aa, Homo sapiens
ARYIRLHPTHYSIRSTLRMEL

SEQ ID NO: 1477 - protein, 21 aa, Homo sapiens
IARYIRLHPTHYSIRSTLRME

SEQ ID NO: 1478 - protein, 21 aa, Homo sapiens
IIARYIRLHPTHYSIRSTLRM

SEQ ID NO: 1479 - protein, 21 aa, Homo sapiens
PIIARYIRLHPTHYSIRSTLR

SEQ ID NO: 1480 - protein, 21 aa, Homo sapiens
PPIIARYIRLHPTHYSIRSTL

SEQ ID NO: 1481 - protein, 21 aa, Homo sapiens
NPPIIARYIRLHPTHYSIRST

SEQ ID NO: 1482 - protein, 21 aa, Homo sapiens
FNPPIIARYIRLHPTHYSIRS

SEQ ID NO: 1483 - protein, 21 aa, Homo sapiens
IFNPPIIARYIRLHPTHYSIR

SEQ ID NO: 1484 - protein, 21 aa, Homo sapiens
RMELMGCDLNSCSMPLGMESK

SEQ ID NO: 1485 - protein, 21 aa, Homo sapiens
LRMELMGCDLNSCSMPLGMES

SEQ ID NO: 1486 - protein, 21 aa, Homo sapiens
TLRMELMGCDLNSCSMPLGME

SEQ ID NO: 1487 - protein, 21 aa, Homo sapiens
STLRMELMGCDLNSCSMPLGM

SEQ ID NO: 1488 - protein, 21 aa, Homo sapiens
RSTLRMELMGCDLNSCSMPLG

SEQ ID NO: 1489 - protein, 21 aa, Homo sapiens
IRSTLRMELMGCDLNSCSMPL

SEQ ID NO: 1490 - protein, 21 aa, Homo sapiens
SIRSTLRMELMGCDLNSCSMP

SEQ ID NO: 1491 - protein, 21 aa, Homo sapiens
YSIRSTLRMELMGCDLNSCSM

SEQ ID NO: 1492 - protein, 21 aa, Homo sapiens
HYSIRSTLRMELMGCDLNSCS

SEQ ID NO: 1493 - protein, 21 aa, Homo sapiens
THYSIRSTLRMELMGCDLNSC

SEQ ID NO: 1494 - protein, 21 aa, Homo sapiens
PTHYSIRSTLRMELMGCDLNS

SEQ ID NO: 1495 - protein, 21 aa, Homo sapiens
HPTHYSIRSTLRMELMGCDLN

SEQ ID NO: 1496 - protein, 21 aa, Homo sapiens
LHPTHYSIRSTLRMELMGCDL

SEQ ID NO: 1497 - protein, 21 aa, Homo sapiens
RLHPTHYSIRSTLRMELMGCD

SEQ ID NO: 1498 - protein, 21 aa, Homo sapiens
IRLHPTHYSIRSTLRMELMGC

SEQ ID NO: 1499 - protein, 21 aa, Homo sapiens
YIRLHPTHYSIRSTLRMELMG

SEQ ID NO: 1500 - protein, 21 aa, Homo sapiens
RYIRLHPTHYSIRSTLRMELM

SEQ ID NO: 1501 - protein, 21 aa, Homo sapiens
ARYIRLHPTHYSIRSTLRMEL

SEQ ID NO: 1502 - protein, 21 aa, Homo sapiens
IARYIRLHPTHYSIRSTLRME

SEQ ID NO: 1503 - protein, 21 aa, Homo sapiens
IIARYIRLHPTHYSIRSTLRM

SEQ ID NO: 1504 - protein, 21 aa, Homo sapiens
PIIARYIRLHPTHYSIRSTLR

SEQ ID NO: 1505 - protein, 21 aa, Homo sapiens
ESKAISDAQITASSYFTNMFA

SEQ ID NO: 1506 - protein, 21 aa, Homo sapiens
MESKAISDAQITASSYFTNMF

SEQ ID NO: 1507 - protein, 21 aa, Homo sapiens
GMESKAISDAQITASSYFTNM

SEQ ID NO: 1508 - protein, 21 aa, Homo sapiens
LGMESKAISDAQITASSYFTN

SEQ ID NO: 1509 - protein, 21 aa, Homo sapiens
PLGMESKAISDAQITASSYFT

SEQ ID NO: 1510 - protein, 21 aa, Homo sapiens
MPLGMESKAISDAQITASSYF

SEQ ID NO: 1511 - protein, 21 aa, Homo sapiens
SMPLGMESKAISDAQITASSY

SEQ ID NO: 1512 - protein, 21 aa, Homo sapiens
CSMPLGMESKAISDAQITASS

SEQ ID NO: 1513 - protein, 21 aa, Homo sapiens
SCSMPLGMESKAISDAQITAS

SEQ ID NO: 1514 - protein, 21 aa, Homo sapiens
NSCSMPLGMESKAISDAQITA

SEQ ID NO: 1515 - protein, 21 aa, Homo sapiens
LNSCSMPLGMESKAISDAQIT

SEQ ID NO: 1516 - protein, 21 aa, Homo sapiens
DLNSCSMPLGMESKAISDAQI

SEQ ID NO: 1517 - protein, 21 aa, Homo sapiens
CDLNSCSMPLGMESKAISDAQ

SEQ ID NO: 1518 - protein, 21 aa, Homo sapiens
GCDLNSCSMPLGMESKAISDA

SEQ ID NO: 1519 - protein, 21 aa, Homo sapiens
MGCDLNSCSMPLGMESKAISD

SEQ ID NO: 1520 - protein, 21 aa, Homo sapiens
LMGCDLNSCSMPLGMESKAIS

SEQ ID NO: 1521 - protein, 21 aa, Homo sapiens
ELMGCDLNSCSMPLGMESKAI

SEQ ID NO: 1522 - protein, 21 aa, Homo sapiens
MELMGCDLNSCSMPLGMESKA

SEQ ID NO: 1523 - protein, 21 aa, Homo sapiens
RMELMGCDLNSCSMPLGMESK

SEQ ID NO: 1524 - protein, 21 aa, Homo sapiens
LRMELMGCDLNSCSMPLGMES

SEQ ID NO: 1525 - protein, 21 aa, Homo sapiens
TLRMELMGCDLNSCSMPLGME

SEQ ID NO: 1526 - protein, 21 aa, Homo sapiens
ATWSPSKARLHLQGRSNAWRP

SEQ ID NO: 1527 - protein, 21 aa, Homo sapiens
FATWSPSKARLHLQGRSNAWR

SEQ ID NO: 1528 - protein, 21 aa, Homo sapiens
MFATWSPSKARLHLQGRSNAW

SEQ ID NO: 1529 - protein, 21 aa, Homo sapiens
NMFATWSPSKARLHLQGRSNA

SEQ ID NO: 1530 - protein, 21 aa, Homo sapiens
TNMFATWSPSKARLHLQGRSN

SEQ ID NO: 1531 - protein, 21 aa, Homo sapiens
FTNMFATWSPSKARLHLQGRS

SEQ ID NO: 1532 - protein, 21 aa, Homo sapiens
YFTNMFATWSPSKARLHLQGR

SEQ ID NO: 1533 - protein, 21 aa, Homo sapiens
SYFTNMFATWSPSKARLHLQG

SEQ ID NO: 1534 - protein, 21 aa, Homo sapiens
SSYFTNMFATWSPSKARLHLQ

SEQ ID NO: 1535 - protein, 21 aa, Homo sapiens
ASSYFTNMFATWSPSKARLHL

SEQ ID NO: 1536 - protein, 21 aa, Homo sapiens
TASSYFTNMFATWSPSKARLH

SEQ ID NO: 1537 - protein, 21 aa, Homo sapiens
ITASSYFTNMFATWSPSKARL

SEQ ID NO: 1538 - protein, 21 aa, Homo sapiens
QITASSYFTNMFATWSPSKAR

SEQ ID NO: 1539 - protein, 21 aa, Homo sapiens
AQITASSYFTNMFATWSPSKA

SEQ ID NO: 1540 - protein, 21 aa, Homo sapiens
DAQITASSYFTNMFATWSPSK

SEQ ID NO: 1541 - protein, 21 aa, Homo sapiens
SDAQITASSYFTNMFATWSPS

SEQ ID NO: 1542 - protein, 21 aa, Homo sapiens
ISDAQITASSYFTNMFATWSP

SEQ ID NO: 1543 - protein, 21 aa, Homo sapiens
AISDAQITASSYFTNMFATWS

SEQ ID NO: 1544 - protein, 21 aa, Homo sapiens
KAISDAQITASSYFTNMFATW

SEQ ID NO: 1545 - protein, 21 aa, Homo sapiens
SKAISDAQITASSYFTNMFAT

SEQ ID NO: 1546 - protein, 21 aa, Homo sapiens
ESKAISDAQITASSYFTNMFA

SEQ ID NO: 1547 - protein, 21 aa, Homo sapiens
RLHLQGRSNAWRPQVNNPKEW

SEQ ID NO: 1548 - protein, 21 aa, Homo sapiens
ARLHLQGRSNAWRPQVNNPKE

SEQ ID NO: 1549 - protein, 21 aa, Homo sapiens
KARLHLQGRSNAWRPQVNNPK

SEQ ID NO: 1550 - protein, 21 aa, Homo sapiens
SKARLHLQGRSNAWRPQVNNP

SEQ ID NO: 1551 - protein, 21 aa, Homo sapiens
PSKARLHLQGRSNAWRPQVNN

SEQ ID NO: 1552 - protein, 21 aa, Homo sapiens
SPSKARLHLQGRSNAWRPQVN

SEQ ID NO: 1553 - protein, 21 aa, Homo sapiens
WSPSKARLHLQGRSNAWRPQV

SEQ ID NO: 1554 - protein, 21 aa, Homo sapiens
TWSPSKARLHLQGRSNAWRPQ

SEQ ID NO: 1555 - protein, 21 aa, Homo sapiens
ATWSPSKARLHLQGRSNAWRP

SEQ ID NO: 1556 - protein, 21 aa, Homo sapiens
FATWSPSKARLHLQGRSNAWR

SEQ ID NO: 1557 - protein, 21 aa, Homo sapiens
MFATWSPSKARLHLQGRSNAW

SEQ ID NO: 1558 - protein, 21 aa, Homo sapiens
NMFATWSPSKARLHLQGRSNA

SEQ ID NO: 1559 - protein, 21 aa, Homo sapiens
TNMFATWSPSKARLHLQGRSN

SEQ ID NO: 1560 - protein, 21 aa, Homo sapiens
FTNMFATWSPSKARLHLQGRS

SEQ ID NO: 1561 - protein, 21 aa, Homo sapiens
YFTNMFATWSPSKARLHLQGR

SEQ ID NO: 1562 - protein, 21 aa, Homo sapiens
SYFTNMFATWSPSKARLHLQG

SEQ ID NO: 1563 - protein, 21 aa, Homo sapiens
SSYFTNMFATWSPSKARLHLQ

SEQ ID NO: 1564 - protein, 21 aa, Homo sapiens
ASSYFTNMFATWSPSKARLHL

SEQ ID NO: 1565 - protein, 21 aa, Homo sapiens
TASSYFTNMFATWSPSKARLH

SEQ ID NO: 1566 - protein, 21 aa, Homo sapiens
ITASSYFTNMFATWSPSKARL

SEQ ID NO: 1567 - protein, 21 aa, Homo sapiens
QITASSYFTNMFATWSPSKAR

SEQ ID NO: 1568 - protein, 21 aa, Homo sapiens
AWRPQVNNPKEWLQVDFQKTM

SEQ ID NO: 1569 - protein, 21 aa, Homo sapiens
NAWRPQVNNPKEWLQVDFQKT

SEQ ID NO: 1570 - protein, 21 aa, Homo sapiens
SNAWRPQVNNPKEWLQVDFQK

SEQ ID NO: 1571 - protein, 21 aa, Homo sapiens
RSNAWRPQVNNPKEWLQVDFQ

SEQ ID NO: 1572 - protein, 21 aa, Homo sapiens
GRSNAWRPQVNNPKEWLQVDF

SEQ ID NO: 1573 - protein, 21 aa, Homo sapiens
QGRSNAWRPQVNNPKEWLQVD

SEQ ID NO: 1574 - protein, 21 aa, Homo sapiens
LQGRSNAWRPQVNNPKEWLQV

SEQ ID NO: 1575 - protein, 21 aa, Homo sapiens
HLQGRSNAWRPQVNNPKEWLQ

SEQ ID NO: 1576 - protein, 21 aa, Homo sapiens
LHLQGRSNAWRPQVNNPKEWL

SEQ ID NO: 1577 - protein, 21 aa, Homo sapiens
RLHLQGRSNAWRPQVNNPKEW

SEQ ID NO: 1578 - protein, 21 aa, Homo sapiens
ARLHLQGRSNAWRPQVNNPKE

SEQ ID NO: 1579 - protein, 21 aa, Homo sapiens
KARLHLQGRSNAWRPQVNNPK

SEQ ID NO: 1580 - protein, 21 aa, Homo sapiens
SKARLHLQGRSNAWRPQVNNP

SEQ ID NO: 1581 - protein, 21 aa, Homo sapiens
PSKARLHLQGRSNAWRPQVNN

SEQ ID NO: 1582 - protein, 21 aa, Homo sapiens
SPSKARLHLQGRSNAWRPQVN

SEQ ID NO: 1583 - protein, 21 aa, Homo sapiens
WSPSKARLHLQGRSNAWRPQV

SEQ ID NO: 1584 - protein, 21 aa, Homo sapiens
TWSPSKARLHLQGRSNAWRPQ

SEQ ID NO: 1585 - protein, 21 aa, Homo sapiens
ATWSPSKARLHLQGRSNAWRP

SEQ ID NO: 1586 - protein, 21 aa, Homo sapiens
FATWSPSKARLHLQGRSNAWR

SEQ ID NO: 1587 - protein, 21 aa, Homo sapiens
MFATWSPSKARLHLQGRSNAW

SEQ ID NO: 1588 - protein, 21 aa, Homo sapiens
NMFATWSPSKARLHLQGRSNA

SEQ ID NO: 1589 - protein, 21 aa, Homo sapiens
EWLQVDFQKTMKVTGVTTQGV

SEQ ID NO: 1590 - protein, 21 aa, Homo sapiens
KEWLQVDFQKTMKVTGVTTQG

SEQ ID NO: 1591 - protein, 21 aa, Homo sapiens
PKEWLQVDFQKTMKVTGVTTQ

SEQ ID NO: 1592 - protein, 21 aa, Homo sapiens
NPKEWLQVDFQKTMKVTGVTT

SEQ ID NO: 1593 - protein, 21 aa, Homo sapiens
NNPKEWLQVDFQKTMKVTGVT

SEQ ID NO: 1594 - protein, 21 aa, Homo sapiens
VNNPKEWLQVDFQKTMKVTGV

SEQ ID NO: 1595 - protein, 21 aa, Homo sapiens
QVNNPKEWLQVDFQKTMKVTG

SEQ ID NO: 1596 - protein, 21 aa, Homo sapiens
PQVNNPKEWLQVDFQKTMKVT

SEQ ID NO: 1597 - protein, 21 aa, Homo sapiens
RPQVNNPKEWLQVDFQKTMKV

SEQ ID NO: 1598 - protein, 21 aa, Homo sapiens
WRPQVNNPKEWLQVDFQKTMK

SEQ ID NO: 1599 - protein, 21 aa, Homo sapiens
AWRPQVNNPKEWLQVDFQKTM

SEQ ID NO: 1600 - protein, 21 aa, Homo sapiens
NAWRPQVNNPKEWLQVDFQKT

SEQ ID NO: 1601 - protein, 21 aa, Homo sapiens
SNAWRPQVNNPKEWLQVDFQK

SEQ ID NO: 1602 - protein, 21 aa, Homo sapiens
RSNAWRPQVNNPKEWLQVDFQ

SEQ ID NO: 1603 - protein, 21 aa, Homo sapiens
GRSNAWRPQVNNPKEWLQVDF

SEQ ID NO: 1604 - protein, 21 aa, Homo sapiens
QGRSNAWRPQVNNPKEWLQVD

SEQ ID NO: 1605 - protein, 21 aa, Homo sapiens
LQGRSNAWRPQVNNPKEWLQV

SEQ ID NO: 1606 - protein, 21 aa, Homo sapiens
HLQGRSNAWRPQVNNPKEWLQ

SEQ ID NO: 1607 - protein, 21 aa, Homo sapiens
HLQGRSNAWRPQVNNPKEWLQ

SEQ ID NO: 1608 - protein, 21 aa, Homo sapiens
RLHLQGRSNAWRPQVNNPKEW

SEQ ID NO: 1609 - protein, 21 aa, Homo sapiens
ARLHLQGRSNAWRPQVNNPKE

SEQ ID NO: 1610 - protein, 21 aa, Homo sapiens
WLQVDFQKTMKVTGVTTQGVK

SEQ ID NO: 1611 - protein, 21 aa, Homo sapiens
EWLQVDFQKTMKVTGVTTQGV

SEQ ID NO: 1612 - protein, 21 aa, Homo sapiens
KEWLQVDFQKTMKVTGVTTQG

SEQ ID NO: 1613 - protein, 21 aa, Homo sapiens
PKEWLQVDFQKTMKVTGVTTQ

SEQ ID NO: 1614 - protein, 21 aa, Homo sapiens
NPKEWLQVDFQKTMKVTGVTT

SEQ ID NO: 1615 - protein, 21 aa, Homo sapiens
NNPKEWLQVDFQKTMKVTGVT

SEQ ID NO: 1616 - protein, 21 aa, Homo sapiens
VNNPKEWLQVDFQKTMKVTGV

SEQ ID NO: 1617 - protein, 21 aa, Homo sapiens
QVNNPKEWLQVDFQKTMKVTG

SEQ ID NO: 1618 - protein, 21 aa, Homo sapiens
PQVNNPKEWLQVDFQKTMKVT

SEQ ID NO: 1619 - protein, 21 aa, Homo sapiens
RPQVNNPKEWLQVDFQKTMKV

SEQ ID NO: 1620 - protein, 21 aa, Homo sapiens
WRPQVNNPKEWLQVDFQKTMK

SEQ ID NO: 1621 - protein, 21 aa, Homo sapiens
AWRPQVNNPKEWLQVDFQKTM

SEQ ID NO: 1622 - protein, 21 aa, Homo sapiens
NAWRPQVNNPKEWLQVDFQKT

SEQ ID NO: 1623 - protein, 21 aa, Homo sapiens
NAWRPQVNNPKEWLQVDFQKT

SEQ ID NO: 1624 - protein, 21 aa, Homo sapiens
NAWRPQVNNPKEWLQVDFQKT

SEQ ID NO: 1625 - protein, 21 aa, Homo sapiens
GRSNAWRPQVNNPKEWLQVDF

SEQ ID NO: 1626 - protein, 21 aa, Homo sapiens
QGRSNAWRPQVNNPKEWLQVD

SEQ ID NO: 1627 - protein, 21 aa, Homo sapiens
LQGRSNAWRPQVNNPKEWLQV

SEQ ID NO: 1628 - protein, 21 aa, Homo sapiens
HLQGRSNAWRPQVNNPKEWLQ

SEQ ID NO: 1629 - protein, 21 aa, Homo sapiens
LHLQGRSNAWRPQVNNPKEWL

SEQ ID NO: 1630 - protein, 21 aa, Homo sapiens
RLHLQGRSNAWRPQVNNPKEW

SEQ ID NO: 1631 - protein, 21 aa, Homo sapiens
LQVDFQKTMKVTGVTTQGVKS

SEQ ID NO: 1632 - protein, 21 aa, Homo sapiens
WLQVDFQKTMKVTGVTTQGVK

SEQ ID NO: 1633 - protein, 21 aa, Homo sapiens
EWLQVDFQKTMKVTGVTTQGV

SEQ ID NO: 1634 - protein, 21 aa, Homo sapiens
KEWLQVDFQKTMKVTGVTTQG

SEQ ID NO: 1635 - protein, 21 aa, Homo sapiens
PKEWLQVDFQKTMKVTGVTTQ

SEQ ID NO: 1636 - protein, 21 aa, Homo sapiens
NPKEWLQVDFQKTMKVTGVTT

SEQ ID NO: 1637 - protein, 21 aa, Homo sapiens
NNPKEWLQVDFQKTMKVTGVT

SEQ ID NO: 1638 - protein, 21 aa, Homo sapiens
VNNPKEWLQVDFQKTMKVTGV

SEQ ID NO: 1639 - protein, 21 aa, Homo sapiens
QVNNPKEWLQVDFQKTMKVTG

SEQ ID NO: 1640 - protein, 21 aa, Homo sapiens
PQVNNPKEWLQVDFQKTMKVT

SEQ ID NO: 1641 - protein, 21 aa, Homo sapiens
RPQVNNPKEWLQVDFQKTMKV

SEQ ID NO: 1642 - protein, 21 aa, Homo sapiens
WRPQVNNPKEWLQVDFQKTMK

SEQ ID NO: 1643 - protein, 21 aa, Homo sapiens
AWRPQVNNPKEWLQVDFQKTM

SEQ ID NO: 1644 - protein, 21 aa, Homo sapiens
NAWRPQVNNPKEWLQVDFQKT

SEQ ID NO: 1645 - protein, 21 aa, Homo sapiens
SNAWRPQVNNPKEWLQVDFQK

SEQ ID NO: 1646 - protein, 21 aa, Homo sapiens
RSNAWRPQVNNPKEWLQVDFQ

SEQ ID NO: 1647 - protein, 21 aa, Homo sapiens
GRSNAWRPQVNNPKEWLQVDF

SEQ ID NO: 1648 - protein, 21 aa, Homo sapiens
QGRSNAWRPQVNNPKEWLQVD

SEQ ID NO: 1649 - protein, 21 aa, Homo sapiens
LQGRSNAWRPQVNNPKEWLQV

SEQ ID NO: 1650 - protein, 21 aa, Homo sapiens
HLQGRSNAWRPQVNNPKEWLQ

SEQ ID NO: 1651 - protein, 21 aa, Homo sapiens
LHLQGRSNAWRPQVNNPKEWL

SEQ ID NO: 1652 - protein, 21 aa, Homo sapiens
VDFQKTMKVTGVTTQGVKSLL

SEQ ID NO: 1653 - protein, 21 aa, Homo sapiens
QVDFQKTMKVTGVTTQGVKSL

SEQ ID NO: 1654 - protein, 21 aa, Homo sapiens
LQVDFQKTMKVTGVTTQGVKS

SEQ ID NO: 1655 - protein, 21 aa, Homo sapiens
WLQVDFQKTMKVTGVTTQGVK

SEQ ID NO: 1656 - protein, 21 aa, Homo sapiens
EWLQVDFQKTMKVTGVTTQGV

SEQ ID NO: 1657 - protein, 21 aa, Homo sapiens
KEWLQVDFQKTMKVTGVTTQG

SEQ ID NO: 1658 - protein, 21 aa, Homo sapiens
PKEWLQVDFQKTMKVTGVTTQ

SEQ ID NO: 1659 - protein, 21 aa, Homo sapiens
NPKEWLQVDFQKTMKVTGVTT

SEQ ID NO: 1660 - protein, 21 aa, Homo sapiens
NNPKEWLQVDFQKTMKVTGVT

SEQ ID NO: 1661 - protein, 21 aa, Homo sapiens
VNNPKEWLQVDFQKTMKVTGV

SEQ ID NO: 1662 - protein, 21 aa, Homo sapiens
QVNNPKEWLQVDFQKTMKVTG

SEQ ID NO: 1663 - protein, 21 aa, Homo sapiens
PQVNNPKEWLQVDFQKTMKVT

SEQ ID NO: 1664 - protein, 21 aa, Homo sapiens
RPQVNNPKEWLQVDFQKTMKV

SEQ ID NO: 1665 - protein, 21 aa, Homo sapiens
WRPQVNNPKEWLQVDFQKTMK

SEQ ID NO: 1666 - protein, 21 aa, Homo sapiens
AWRPQVNNPKEWLQVDFQKTM

SEQ ID NO: 1667 - protein, 21 aa, Homo sapiens
NAWRPQVNNPKEWLQVDFQKT

SEQ ID NO: 1668 - protein, 21 aa, Homo sapiens
SNAWRPQVNNPKEWLQVDFQK

SEQ ID NO: 1669 - protein, 21 aa, Homo sapiens
RSNAWRPQVNNPKEWLQVDFQ

SEQ ID NO: 1670 - protein, 21 aa, Homo sapiens
GRSNAWRPQVNNPKEWLQVDF

SEQ ID NO: 1671 - protein, 21 aa, Homo sapiens
QGRSNAWRPQVNNPKEWLQVD

SEQ ID NO: 1672 - protein, 21 aa, Homo sapiens
LQGRSNAWRPQVNNPKEWLQV

SEQ ID NO: 1673 - protein, 21 aa, Homo sapiens
QGVKSLLTSMYVKEFLISSSQ

SEQ ID NO: 1674 - protein, 21 aa, Homo sapiens
TQGVKSLLTSMYVKEFLISSS

SEQ ID NO: 1675 - protein, 21 aa, Homo sapiens
TTQGVKSLLTSMYVKEFLISS

SEQ ID NO: 1676 - protein, 21 aa, Homo sapiens
VTTQGVKSLLTSMYVKEFLIS

SEQ ID NO: 1677 - protein, 21 aa, Homo sapiens
GVTTQGVKSLLTSMYVKEFLI

SEQ ID NO: 1678 - protein, 21 aa, Homo sapiens
TGVTTQGVKSLLTSMYVKEFL

SEQ ID NO: 1679 - protein, 21 aa, Homo sapiens
VTGVTTQGVKSLLTSMYVKEF

SEQ ID NO: 1680 - protein, 21 aa, Homo sapiens
KVTGVTTQGVKSLLTSMYVKE

SEQ ID NO: 1681 - protein, 21 aa, Homo sapiens
MKVTGVTTQGVKSLLTSMYVK

SEQ ID NO: 1682 - protein, 21 aa, Homo sapiens
TMKVTGVTTQGVKSLLTSMYV

SEQ ID NO: 1683 - protein, 21 aa, Homo sapiens
KTMKVTGVTTQGVKSLLTSMY

SEQ ID NO: 1684 - protein, 21 aa, Homo sapiens
QKTMKVTGVTTQGVKSLLTSM

SEQ ID NO: 1685 - protein, 21 aa, Homo sapiens
FQKTMKVTGVTTQGVKSLLTS

SEQ ID NO: 1686 - protein, 21 aa, Homo sapiens
DFQKTMKVTGVTTQGVKSLLT

SEQ ID NO: 1687 - protein, 21 aa, Homo sapiens
VDFQKTMKVTGVTTQGVKSLL

SEQ ID NO: 1688 - protein, 21 aa, Homo sapiens
QVDFQKTMKVTGVTTQGVKSL

SEQ ID NO: 1689 - protein, 21 aa, Homo sapiens
LQVDFQKTMKVTGVTTQGVKS

SEQ ID NO: 1690 - protein, 21 aa, Homo sapiens
WLQVDFQKTMKVTGVTTQGVK

SEQ ID NO: 1691 - protein, 21 aa, Homo sapiens
EWLQVDFQKTMKVTGVTTQGV

SEQ ID NO: 1692 - protein, 21 aa, Homo sapiens
KEWLQVDFQKTMKVTGVTTQG

SEQ ID NO: 1693 - protein, 21 aa, Homo sapiens
PKEWLQVDFQKTMKVTGVTTQ

SEQ ID NO: 1694 - protein, 21 aa, Homo sapiens
VKEFLISSSQDGHQWTLFFQN

SEQ ID NO: 1695 - protein, 21 aa, Homo sapiens
YVKEFLISSSQDGHQWTLFFQ

SEQ ID NO: 1696 - protein, 21 aa, Homo sapiens
MYVKEFLISSSQDGHQWTLFF

SEQ ID NO: 1697 - protein, 21 aa, Homo sapiens
SMYVKEFLISSSQDGHQWTLF

SEQ ID NO: 1698 - protein, 21 aa, Homo sapiens
TSMYVKEFLISSSQDGHQWTL

SEQ ID NO: 1699 - protein, 21 aa, Homo sapiens
LTSMYVKEFLISSSQDGHQWT

SEQ ID NO: 1700 - protein, 21 aa, Homo sapiens
LLTSMYVKEFLISSSQDGHQW

SEQ ID NO: 1701 - protein, 21 aa, Homo sapiens
SLLTSMYVKEFLISSSQDGHQ

SEQ ID NO: 1702 - protein, 21 aa, Homo sapiens
KSLLTSMYVKEFLISSSQDGH

SEQ ID NO: 1703 - protein, 21 aa, Homo sapiens
VKSLLTSMYVKEFLISSSQDG

SEQ ID NO: 1704 - protein, 21 aa, Homo sapiens
GVKSLLTSMYVKEFLISSSQD

SEQ ID NO: 1705 - protein, 21 aa, Homo sapiens
QGVKSLLTSMYVKEFLISSSQ

SEQ ID NO: 1706 - protein, 21 aa, Homo sapiens
TQGVKSLLTSMYVKEFLISSS

SEQ ID NO: 1707 - protein, 21 aa, Homo sapiens
TTQGVKSLLTSMYVKEFLISS

SEQ ID NO: 1708 - protein, 21 aa, Homo sapiens
VTTQGVKSLLTSMYVKEFLIS

SEQ ID NO: 1709 - protein, 21 aa, Homo sapiens
GVTTQGVKSLLTSMYVKEFLI

SEQ ID NO: 1710 - protein, 21 aa, Homo sapiens
TGVTTQGVKSLLTSMYVKEFL

SEQ ID NO: 1711 - protein, 21 aa, Homo sapiens
VTGVTTQGVKSLLTSMYVKEF

SEQ ID NO: 1712 - protein, 21 aa, Homo sapiens
KVTGVTTQGVKSLLTSMYVKE

SEQ ID NO: 1713 - protein, 21 aa, Homo sapiens
MKVTGVTTQGVKSLLTSMYVK

SEQ ID NO: 1714 - protein, 21 aa, Homo sapiens
TMKVTGVTTQGVKSLLTSMYV

SEQ ID NO: 1715 - protein, 21 aa, Homo sapiens
FLISSSQDGHQWTLFFQNGKV

SEQ ID NO: 1716 - protein, 21 aa, Homo sapiens
EFLISSSQDGHQWTLFFQNGK

SEQ ID NO: 1717 - protein, 21 aa, Homo sapiens
KEFLISSSQDGHQWTLFFQNG

SEQ ID NO: 1718 - protein, 21 aa, Homo sapiens
VKEFLISSSQDGHQWTLFFQN

SEQ ID NO: 1719 - protein, 21 aa, Homo sapiens
YVKEFLISSSQDGHQWTLFFQ

SEQ ID NO: 1720 - protein, 21 aa, Homo sapiens
MYVKEFLISSSQDGHQWTLFF

SEQ ID NO: 1721 - protein, 21 aa, Homo sapiens
SMYVKEFLISSSQDGHQWTLF

SEQ ID NO: 1722 - protein, 21 aa, Homo sapiens
TSMYVKEFLISSSQDGHQWTL

SEQ ID NO: 1723 - protein, 21 aa, Homo sapiens
LTSMYVKEFLISSSQDGHQWT

SEQ ID NO: 1724 - protein, 21 aa, Homo sapiens
LLTSMYVKEFLISSSQDGHQW

SEQ ID NO: 1725 - protein, 21 aa, Homo sapiens
SLLTSMYVKEFLISSSQDGHQ

SEQ ID NO: 1726 - protein, 21 aa, Homo sapiens
KSLLTSMYVKEFLISSSQDGH

SEQ ID NO: 1727 - protein, 21 aa, Homo sapiens
VKSLLTSMYVKEFLISSSQDG

SEQ ID NO: 1728 - protein, 21 aa, Homo sapiens
GVKSLLTSMYVKEFLISSSQD

SEQ ID NO: 1729 - protein, 21 aa, Homo sapiens
QGVKSLLTSMYVKEFLISSSQ

SEQ ID NO: 1730 - protein, 21 aa, Homo sapiens
TQGVKSLLTSMYVKEFLISSS

SEQ ID NO: 1731 - protein, 21 aa, Homo sapiens
TTQGVKSLLTSMYVKEFLISS

SEQ ID NO: 1732 - protein, 21 aa, Homo sapiens
VTTQGVKSLLTSMYVKEFLIS

SEQ ID NO: 1733 - protein, 21 aa, Homo sapiens
GVTTQGVKSLLTSMYVKEFLI

SEQ ID NO: 1734 - protein, 21 aa, Homo sapiens
TGVTTQGVKSLLTSMYVKEFL

SEQ ID NO: 1735 - protein, 21 aa, Homo sapiens
VTGVTTQGVKSLLTSMYVKEF

SEQ ID NO: 1736 - protein, 21 aa, Homo sapiens
NQDSFTPVVNSLDPPLLTRYL

SEQ ID NO: 1737 - protein, 21 aa, Homo sapiens
GNQDSFTPVVNSLDPPLLTRY

SEQ ID NO: 1738 - protein, 21 aa, Homo sapiens
QGNQDSFTPVVNSLDPPLLTR

SEQ ID NO: 1739 - protein, 21 aa, Homo sapiens
FQGNQDSFTPVVNSLDPPLLT

SEQ ID NO: 1740 - protein, 21 aa, Homo sapiens
VFQGNQDSFTPVVNSLDPPLL

SEQ ID NO: 1741 - protein, 21 aa, Homo sapiens
KVFQGNQDSFTPVVNSLDPPL

SEQ ID NO: 1742 - protein, 21 aa, Homo sapiens
VKVFQGNQDSFTPVVNSLDPP

SEQ ID NO: 1743 - protein, 21 aa, Homo sapiens
KVKVFQGNQDSFTPVVNSLDP

SEQ ID NO: 1744 - protein, 21 aa, Homo sapiens
GKVKVFQGNQDSFTPVVNSLD

SEQ ID NO: 1745 - protein, 21 aa, Homo sapiens
NGKVKVFQGNQDSFTPVVNSL

SEQ ID NO: 1746 - protein, 21 aa, Homo sapiens
QNGKVKVFQGNQDSFTPVVNS

SEQ ID NO: 1747 - protein, 21 aa, Homo sapiens
FQNGKVKVFQGNQDSFTPVVN

SEQ ID NO: 1748 - protein, 21 aa, Homo sapiens
FFQNGKVKVFQGNQDSFTPVV

SEQ ID NO: 1749 - protein, 21 aa, Homo sapiens
LFFQNGKVKVFQGNQDSFTPV

SEQ ID NO: 1750 - protein, 21 aa, Homo sapiens
TLFFQNGKVKVFQGNQDSFTP

SEQ ID NO: 1751 - protein, 21 aa, Homo sapiens
WTLFFQNGKVKVFQGNQDSFT

SEQ ID NO: 1752 - protein, 21 aa, Homo sapiens
QWTLFFQNGKVKVFQGNQDSF

SEQ ID NO: 1753 - protein, 21 aa, Homo sapiens
HQWTLFFQNGKVKVFQGNQDS

SEQ ID NO: 1754 - protein, 21 aa, Homo sapiens
GHQWTLFFQNGKVKVFQGNQD

SEQ ID NO: 1755 - protein, 21 aa, Homo sapiens
DGHQWTLFFQNGKVKVFQGNQ

SEQ ID NO: 1756 - protein, 21 aa, Homo sapiens
QDGHQWTLFFQNGKVKVFQGN

SEQ ID NO: 1757 - protein, 21 aa, Homo sapiens
PLLTRYLRIHPQSWVHQIALR

SEQ ID NO: 1758 - protein, 21 aa, Homo sapiens
PPLLTRYLRIHPQSWVHQIAL

SEQ ID NO: 1759 - protein, 21 aa, Homo sapiens
DPPLLTRYLRIHPQSWVHQIA

SEQ ID NO: 1760 - protein, 21 aa, Homo sapiens
LDPPLLTRYLRIHPQSWVHQI

SEQ ID NO: 1761 - protein, 21 aa, Homo sapiens
SLDPPLLTRYLRIHPQSWVHQ

SEQ ID NO: 1762 - protein, 21 aa, Homo sapiens
NSLDPPLLTRYLRIHPQSWVH

SEQ ID NO: 1763 - protein, 21 aa, Homo sapiens
VNSLDPPLLTRYLRIHPQSWV

SEQ ID NO: 1764 - protein, 21 aa, Homo sapiens
VVNSLDPPLLTRYLRIHPQSW

SEQ ID NO: 1765 - protein, 21 aa, Homo sapiens
PVVNSLDPPLLTRYLRIHPQS

SEQ ID NO: 1766 - protein, 21 aa, Homo sapiens
TPVVNSLDPPLLTRYLRIHPQ

SEQ ID NO: 1767 - protein, 21 aa, Homo sapiens
FTPVVNSLDPPLLTRYLRIHP

SEQ ID NO: 1768 - protein, 21 aa, Homo sapiens
SFTPVVNSLDPPLLTRYLRIH

SEQ ID NO: 1769 - protein, 21 aa, Homo sapiens
DSFTPVVNSLDPPLLTRYLRI

SEQ ID NO: 1770 - protein, 21 aa, Homo sapiens
QDSFTPVVNSLDPPLLTRYLR

SEQ ID NO: 1771 - protein, 21 aa, Homo sapiens
NQDSFTPVVNSLDPPLLTRYL

SEQ ID NO: 1772 - protein, 21 aa, Homo sapiens
GNQDSFTPVVNSLDPPLLTRY

SEQ ID NO: 1773 - protein, 21 aa, Homo sapiens
QGNQDSFTPVVNSLDPPLLTR

SEQ ID NO: 1774 - protein, 21 aa, Homo sapiens
FQGNQDSFTPVVNSLDPPLLT

SEQ ID NO: 1775 - protein, 21 aa, Homo sapiens
VFQGNQDSFTPVVNSLDPPLL

SEQ ID NO: 1776 - protein, 21 aa, Homo sapiens
KVFQGNQDSFTPVVNSLDPPL

SEQ ID NO: 1777 - protein, 21 aa, Homo sapiens
VKVFQGNQDSFTPVVNSLDPP

SEQ ID NO: 1778 - protein, 21 aa, Homo sapiens
RYLRIHPQSWVHQIALRMEVL

SEQ ID NO: 1779 - protein, 21 aa, Homo sapiens
TRYLRIHPQSWVHQIALRMEV

SEQ ID NO: 1780 - protein, 21 aa, Homo sapiens
LTRYLRIHPQSWVHQIALRME

SEQ ID NO: 1781 - protein, 21 aa, Homo sapiens
LLTRYLRIHPQSWVHQIALRM

SEQ ID NO: 1782 - protein, 21 aa, Homo sapiens
PLLTRYLRIHPQSWVHQIALR

SEQ ID NO: 1783 - protein, 21 aa, Homo sapiens
PPLLTRYLRIHPQSWVHQIAL

SEQ ID NO: 1784 - protein, 21 aa, Homo sapiens
DPPLLTRYLRIHPQSWVHQIA

SEQ ID NO: 1785 - protein, 21 aa, Homo sapiens
LDPPLLTRYLRIHPQSWVHQI

SEQ ID NO: 1786 - protein, 21 aa, Homo sapiens
SLDPPLLTRYLRIHPQSWVHQ

SEQ ID NO: 1787 - protein, 21 aa, Homo sapiens
NSLDPPLLTRYLRIHPQSWVH

SEQ ID NO: 1788 - protein, 21 aa, Homo sapiens
VNSLDPPLLTRYLRIHPQSWV

SEQ ID NO: 1789 - protein, 21 aa, Homo sapiens
VVNSLDPPLLTRYLRIHPQSW

SEQ ID NO: 1790 - protein, 21 aa, Homo sapiens
PVVNSLDPPLLTRYLRIHPQS

SEQ ID NO: 1791 - protein, 21 aa, Homo sapiens
TPVVNSLDPPLLTRYLRIHPQ

SEQ ID NO: 1792 - protein, 21 aa, Homo sapiens
FTPVVNSLDPPLLTRYLRIHP

SEQ ID NO: 1793 - protein, 21 aa, Homo sapiens
SFTPVVNSLDPPLLTRYLRIH

SEQ ID NO: 1794 - protein, 21 aa, Homo sapiens
DSFTPVVNSLDPPLLTRYLRI

SEQ ID NO: 1795 - protein, 21 aa, Homo sapiens
QDSFTPVVNSLDPPLLTRYLR

SEQ ID NO: 1796 - protein, 21 aa, Homo sapiens
NQDSFTPVVNSLDPPLLTRYL

SEQ ID NO: 1797 - protein, 21 aa, Homo sapiens
GNQDSFTPVVNSLDPPLLTRY

SEQ ID NO: 1798 - protein, 21 aa, Homo sapiens
QGNQDSFTPVVNSLDPPLLTR

SEQ ID NO: 1799 - protein, 21 aa, Homo sapiens
RIHPQSWVHQIALRMEVLGCE

SEQ ID NO: 1800 - protein, 21 aa, Homo sapiens
LRIHPQSWVHQIALRMEVLGC

SEQ ID NO: 1801 - protein, 21 aa, Homo sapiens
LRIHPQSWVHQIALRMEVLGC

SEQ ID NO: 1802 - protein, 21 aa, Homo sapiens
RYLRIHPQSWVHQIALRMEVL

SEQ ID NO: 1803 - protein, 21 aa, Homo sapiens
TRYLRIHPQSWVHQIALRMEV

SEQ ID NO: 1804 - protein, 21 aa, Homo sapiens
LTRYLRIHPQSWVHQIALRME

SEQ ID NO: 1805 - protein, 21 aa, Homo sapiens
LLTRYLRIHPQSWVHQIALRM

SEQ ID NO: 1806 - protein, 21 aa, Homo sapiens
PLLTRYLRIHPQSWVHQIALR

SEQ ID NO: 1807 - protein, 21 aa, Homo sapiens
PPLLTRYLRIHPQSWVHQIAL

SEQ ID NO: 1808 - protein, 21 aa, Homo sapiens
DPPLLTRYLRIHPQSWVHQIA

SEQ ID NO: 1809 - protein, 21 aa, Homo sapiens
DPPLLTRYLRIHPQSWVHQIA

SEQ ID NO: 1810 - protein, 21 aa, Homo sapiens
SLDPPLLTRYLRIHPQSWVHQ

SEQ ID NO: 1811 - protein, 21 aa, Homo sapiens
NSLDPPLLTRYLRIHPQSWVH

SEQ ID NO: 1812 - protein, 21 aa, Homo sapiens
VNSLDPPLLTRYLRIHPQSWV

SEQ ID NO: 1813 - protein, 21 aa, Homo sapiens
VVNSLDPPLLTRYLRIHPQSW

SEQ ID NO: 1814 - protein, 21 aa, Homo sapiens
PVVNSLDPPLLTRYLRIHPQS

SEQ ID NO: 1815 - protein, 21 aa, Homo sapiens
TPVVNSLDPPLLTRYLRIHPQ

SEQ ID NO: 1816 - protein, 21 aa, Homo sapiens
FTPVVNSLDPPLLTRYLRIHP

SEQ ID NO: 1817 - protein, 21 aa, Homo sapiens
SFTPVVNSLDPPLLTRYLRIH

SEQ ID NO: 1818 - protein, 21 aa, Homo sapiens
DSFTPVVNSLDPPLLTRYLRI

SEQ ID NO: 1819 - protein, 21 aa, Homo sapiens
QDSFTPVVNSLDPPLLTRYLR

SEQ ID NO: 1820 - protein, 21 aa, Homo sapiens
EYDDQTSQREKEDDKVFPGGS

SEQ ID NO: 1821 - protein, 21 aa, Homo sapiens
AEYDDQTSQREKEDDKVFPGG

SEQ ID NO: 1822 - protein, 21 aa, Homo sapiens
GAEYDDQTSQREKEDDKVFPG

SEQ ID NO: 1823 - protein, 21 aa, Homo sapiens
EGAEYDDQTSQREKEDDKVFP

SEQ ID NO: 1824 - protein, 21 aa, Homo sapiens
SEGAEYDDQTSQREKEDDKVF

SEQ ID NO: 1825 - protein, 21 aa, Homo sapiens
ASEGAEYDDQTSQREKEDDKV

SEQ ID NO: 1826 - protein, 21 aa, Homo sapiens
KASEGAEYDDQTSQREKEDDK

SEQ ID NO: 1827 - protein, 21 aa, Homo sapiens
WKASEGAEYDDQTSQREKEDD

SEQ ID NO: 1828 - protein, 21 aa, Homo sapiens
YWKASEGAEYDDQTSQREKED

SEQ ID NO: 1829 - protein, 21 aa, Homo sapiens
SYWKASEGAEYDDQTSQREKE

SEQ ID NO: 1830 - protein, 21 aa, Homo sapiens
VSYWKASEGAEYDDQTSQREK

SEQ ID NO: 1831 - protein, 21 aa, Homo sapiens
GVSYWKASEGAEYDDQTSQRE

SEQ ID NO: 1832 - protein, 21 aa, Homo sapiens
VGVSYWKASEGAEYDDQTSQR

SEQ ID NO: 1833 - protein, 21 aa, Homo sapiens
AVGVSYWKASEGAEYDDQTSQ

SEQ ID NO: 1834 - protein, 21 aa, Homo sapiens
HAVGVSYWKASEGAEYDDQTS

SEQ ID NO: 1835 - protein, 21 aa, Homo sapiens
LHAVGVSYWKASEGAEYDDQT

SEQ ID NO: 1836 - protein, 21 aa, Homo sapiens
SLHAVGVSYWKASEGAEYDDQ

SEQ ID NO: 1837 - protein, 21 aa, Homo sapiens
SLHAVGVSYWKASEGAEYDDQ

SEQ ID NO: 1838 - protein, 21 aa, Homo sapiens
PVSLHAVGVSYWKASEGAEYD

SEQ ID NO: 1839 - protein, 21 aa, Homo sapiens
HPVSLHAVGVSYWKASEGAEY

SEQ ID NO: 1840 - protein, 21 aa, Homo sapiens
SHPVSLHAVGVSYWKASEGAE

SEQ ID NO: 1841 - protein, 21 aa, Homo sapiens
DYDDQTSQREKEDDKVFPGGS

SEQ ID NO: 1842 - protein, 21 aa, Homo sapiens
ADYDDQTSQREKEDDKVFPGG

SEQ ID NO: 1843 - protein, 21 aa, Homo sapiens
GADYDDQTSQREKEDDKVFPG

SEQ ID NO: 1844 - protein, 21 aa, Homo sapiens
EGADYDDQTSQREKEDDKVFP

SEQ ID NO: 1845 - protein, 21 aa, Homo sapiens
SEGADYDDQTSQREKEDDKVF

SEQ ID NO: 1846 - protein, 21 aa, Homo sapiens
ASEGADYDDQTSQREKEDDKV

SEQ ID NO: 1847 - protein, 21 aa, Homo sapiens
KASEGADYDDQTSQREKEDDK

SEQ ID NO: 1848 - protein, 21 aa, Homo sapiens
WKASEGADYDDQTSQREKEDD

SEQ ID NO: 1849 - protein, 21 aa, Homo sapiens
YWKASEGADYDDQTSQREKED

SEQ ID NO: 1850 - protein, 21 aa, Homo sapiens
SYWKASEGADYDDQTSQREKE

SEQ ID NO: 1851 - protein, 21 aa, Homo sapiens
VSYWKASEGADYDDQTSQREK

SEQ ID NO: 1852 - protein, 21 aa, Homo sapiens
GVSYWKASEGADYDDQTSQRE

SEQ ID NO: 1853 - protein, 21 aa, Homo sapiens [sequence omitted]

SEQ ID NO: 1854 - protein, 21 aa, Homo sapiens
AVGVSYWKASEGADYDDQTSQ

SEQ ID NO: 1855 - protein, 21 aa, Homo sapiens
HAVGVSYWKASEGADYDDQTS

SEQ ID NO: 1856 - protein, 21 aa, Homo sapiens
LHAVGVSYWKASEGADYDDQT

SEQ ID NO: 1857 - protein, 21 aa, Homo sapiens
SLHAVGVSYWKASEGADYDDQ

SEQ ID NO: 1858 - protein, 21 aa, Homo sapiens
VSLHAVGVSYWKASEGADYDD

SEQ ID NO: 1859 - protein, 21 aa, Homo sapiens
PVSLHAVGVSYWKASEGADYD

SEQ ID NO: 1860 - protein, 21 aa, Homo sapiens
HPVSLHAVGVSYWKASEGADY

SEQ ID NO: 1861 - protein, 21 aa, Homo sapiens
SHPVSLHAVGVSYWKASEGAD

SEQ ID NO: 1862 - protein, 21 aa, Homo sapiens
QLRMKNNEEAEDYDDDLTDSE

SEQ ID NO: 1863 - protein, 21 aa, Homo sapiens
PQLRMKNNEEAEDYDDDLTDS

SEQ ID NO: 1864 - protein, 21 aa, Homo sapiens
EPQLRMKNNEEAEDYDDDLTD

SEQ ID NO: 1865 - protein, 21 aa, Homo sapiens
EPQLRMKNNEEAEDYDDDLTD

SEQ ID NO: 1866 - protein, 21 aa, Homo sapiens
PEEPQLRMKNNEEAEDYDDDL

SEQ ID NO: 1867 - protein, 21 aa, Homo sapiens
CPEEPQLRMKNNEEAEDYDDD

SEQ ID NO: 1868 - protein, 21 aa, Homo sapiens
SCPEEPQLRMKNNEEAEDYDD

SEQ ID NO: 1869 - protein, 21 aa, Homo sapiens
DSCPEEPQLRMKNNEEAEDYD

SEQ ID NO: 1870 - protein, 21 aa, Homo sapiens
VDSCPEEPQLRMKNNEEAEDY

SEQ ID NO: 1871 - protein, 21 aa, Homo sapiens
KVDSCPEEPQLRMKNNEEAED

SEQ ID NO: 1872 - protein, 21 aa, Homo sapiens
VKVDSCPEEPQLRMKNNEEAE

SEQ ID NO: 1873 - protein, 21 aa, Homo sapiens
YVKVDSCPEEPQLRMKNNEEA

SEQ ID NO: 1874 - protein, 21 aa, Homo sapiens
YVKVDSCPEEPQLRMKNNEEA

SEQ ID NO: 1875 - protein, 21 aa, Homo sapiens
EAYVKVDSCPEEPQLRMKNNE

SEQ ID NO: 1876 - protein, 21 aa, Homo sapiens
MEAYVKVDSCPEEPQLRMKNN

SEQ ID NO: 1877 - protein, 21 aa, Homo sapiens
GMEAYVKVDSCPEEPQLRMKN

SEQ ID NO: 1878 - protein, 21 aa, Homo sapiens
DGMEAYVKVDSCPEEPQLRMK

SEQ ID NO: 1879 - protein, 21 aa, Homo sapiens
HDGMEAYVKVDSCPEEPQLRM

SEQ ID NO: 1880 - protein, 21 aa, Homo sapiens
QHDGMEAYVKVDSCPEEPQLR

SEQ ID NO: 1881 - protein, 21 aa, Homo sapiens
HQHDGMEAYVKVDSCPEEPQL

SEQ ID NO: 1882 - protein, 21 aa, Homo sapiens
SHQHDGMEAYVKVDSCPEEPQ

SEQ ID NO: 1883 - protein, 21 aa, Homo sapiens
PLRMKNNEEAEDYDDDLTDSE

SEQ ID NO: 1884 - protein, 21 aa, Homo sapiens
PPLRMKNNEEAEDYDDDLTDS

SEQ ID NO: 1885 - protein, 21 aa, Homo sapiens
EPPLRMKNNEEAEDYDDDLTD

SEQ ID NO: 1886 - protein, 21 aa, Homo sapiens
EEPPLRMKNNEEAEDYDDDLT

SEQ ID NO: 1887 - protein, 21 aa, Homo sapiens
PEEPPLRMKNNEEAEDYDDDL

SEQ ID NO: 1888 - protein, 21 aa, Homo sapiens
CPEEPPLRMKNNEEAEDYDDD

SEQ ID NO: 1889 - protein, 21 aa, Homo sapiens
SCPEEPPLRMKNNEEAEDYDD

SEQ ID NO: 1890 - protein, 21 aa, Homo sapiens
DSCPEEPPLRMKNNEEAEDYD

SEQ ID NO: 1891 - protein, 21 aa, Homo sapiens
VDSCPEEPPLRMKNNEEAEDY

SEQ ID NO: 1892 - protein, 21 aa, Homo sapiens
KVDSCPEEPPLRMKNNEEAED

SEQ ID NO: 1893 - protein, 21 aa, Homo sapiens [sequence omitted]

SEQ ID NO: 1894 - protein, 21 aa, Homo sapiens
YVKVDSCPEEPPLRMKNNEEA

SEQ ID NO: 1895 - protein, 21 aa, Homo sapiens
AYVKVDSCPEEPPLRMKNNEE

SEQ ID NO: 1896 - protein, 21 aa, Homo sapiens
AYVKVDSCPEEPPLRMKNNEE

SEQ ID NO: 1897 - protein, 21 aa, Homo sapiens
MEAYVKVDSCPEEPPLRMKNN

SEQ ID NO: 1898 - protein, 21 aa, Homo sapiens
GMEAYVKVDSCPEEPPLRMKN

SEQ ID NO: 1899 - protein, 21 aa, Homo sapiens
DGMEAYVKVDSCPEEPPLRMK

SEQ ID NO: 1900 - protein, 21 aa, Homo sapiens
HDGMEAYVKVDSCPEEPPLRM

SEQ ID NO: 1901 - protein, 21 aa, Homo sapiens [sequence omitted]

SEQ ID NO: 1902 - protein, 21 aa, Homo sapiens
HQHDGMEAYVKVDSCPEEPPL

SEQ ID NO: 1903 - protein, 21 aa, Homo sapiens
SHQHDGMEAYVKVDSCPEEPP

SEQ ID NO: 1904 - protein, 21 aa, Homo sapiens
AAEEEDWDYAPLVLAPDDRSY

SEQ ID NO: 1905 - protein, 21 aa, Homo sapiens
IAAEEEDWDYAPLVLAPDDRS

SEQ ID NO: 1906 - protein, 21 aa, Homo sapiens
YIAAEEEDWDYAPLVLAPDDR

SEQ ID NO: 1907 - protein, 21 aa, Homo sapiens
HYIAAEEEDWDYAPLVLAPDD

SEQ ID NO: 1908 - protein, 21 aa, Homo sapiens
VHYIAAEEEDWDYAPLVLAPD

SEQ ID NO: 1909 - protein, 21 aa, Homo sapiens
WVHYIAAEEEDWDYAPLVLAP

SEQ ID NO: 1910 - protein, 21 aa, Homo sapiens
TWVHYIAAEEEDWDYAPLVLA

SEQ ID NO: 1911 - protein, 21 aa, Homo sapiens
KTWVHYIAAEEEDWDYAPLVL

SEQ ID NO: 1912 - protein, 21 aa, Homo sapiens
PKTWVHYIAAEEEDWDYAPLV

SEQ ID NO: 1913 - protein, 21 aa, Homo sapiens
HPKTWVHYIAAEEEDWDYAPL

SEQ ID NO: 1914 - protein, 21 aa, Homo sapiens
KHPKTWVHYIAAEEEDWDYAP

SEQ ID NO: 1915 - protein, 21 aa, Homo sapiens
KKHPKTWVHYIAAEEEDWDYA

SEQ ID NO: 1916 - protein, 21 aa, Homo sapiens
AKKHPKTWVHYIAAEEEDWDY

SEQ ID NO: 1917 - protein, 21 aa, Homo sapiens
VAKKHPKTWVHYIAAEEEDWD

SEQ ID NO: 1918 - protein, 21 aa, Homo sapiens
SVAKKHPKTWVHYIAAEEEDW

SEQ ID NO: 1919 - protein, 21 aa, Homo sapiens
RSVAKKHPKTWVHYIAAEEED

SEQ ID NO: 1920 - protein, 21 aa, Homo sapiens
IRSVAKKHPKTWVHYIAAEEE

SEQ ID NO: 1921 - protein, 21 aa, Homo sapiens
QIRSVAKKHPKTWVHYIAAEE

SEQ ID NO: 1922 - protein, 21 aa, Homo sapiens
IQIRSVAKKHPKTWVHYIAAE

SEQ ID NO: 1923 - protein, 21 aa, Homo sapiens
FIQIRSVAKKHPKTWVHYIAA

SEQ ID NO: 1924 - protein, 21 aa, Homo sapiens
SFIQIRSVAKKHPKTWVHYIA

SEQ ID NO: 1925 - protein, 21 aa, Homo sapiens
TAEEEDWDYAPLVLAPDDRSY

SEQ ID NO: 1926 - protein, 21 aa, Homo sapiens
ITAEEEDWDYAPLVLAPDDRS

SEQ ID NO: 1927 - protein, 21 aa, Homo sapiens
YITAEEEDWDYAPLVLAPDDR

SEQ ID NO: 1928 - protein, 21 aa, Homo sapiens
HYITAEEEDWDYAPLVLAPDD

SEQ ID NO: 1929 - protein, 21 aa, Homo sapiens
VHYITAEEEDWDYAPLVLAPD

SEQ ID NO: 1930 - protein, 21 aa, Homo sapiens
WVHYITAEEEDWDYAPLVLAP

SEQ ID NO: 1931 - protein, 21 aa, Homo sapiens
TWVHYITAEEEDWDYAPLVLA

SEQ ID NO: 1932 - protein, 21 aa, Homo sapiens
KTWVHYITAEEEDWDYAPLVL

SEQ ID NO: 1933 - protein, 21 aa, Homo sapiens
PKTWVHYITAEEEDWDYAPLV

SEQ ID NO: 1934 - protein, 21 aa, Homo sapiens
HPKTWVHYITAEEEDWDYAPL

SEQ ID NO: 1935 - protein, 21 aa, Homo sapiens
KHPKTWVHYITAEEEDWDYAP

SEQ ID NO: 1936 - protein, 21 aa, Homo sapiens
KKHPKTWVHYITAEEEDWDYA

SEQ ID NO: 1937 - protein, 21 aa, Homo sapiens
AKKHPKTWVHYITAEEEDWDY

SEQ ID NO: 1938 - protein, 21 aa, Homo sapiens
VAKKHPKTWVHYITAEEEDWD

SEQ ID NO: 1939 - protein, 21 aa, Homo sapiens
SVAKKHPKTWVHYITAEEEDW

SEQ ID NO: 1940 - protein, 21 aa, Homo sapiens
RSVAKKHPKTWVHYITAEEED

SEQ ID NO: 1941 - protein, 21 aa, Homo sapiens
IRSVAKKHPKTWVHYITAEEE

SEQ ID NO: 1942 - protein, 21 aa, Homo sapiens
QIRSVAKKHPKTWVHYITAEE

SEQ ID NO: 1943 - protein, 21 aa, Homo sapiens
IQIRSVAKKHPKTWVHYITAE

SEQ ID NO: 1944 - protein, 21 aa, Homo sapiens
FIQIRSVAKKHPKTWVHYITA

SEQ ID NO: 1945 - protein, 21 aa, Homo sapiens
SFIQIRSVAKKHPKTWVHYIT

SEQ ID NO: 1946 - protein, 21 aa, Homo sapiens
RPLYSRRLPKGVKHLKDFPIL

SEQ ID NO: 1947 - protein, 21 aa, Homo sapiens
VRPLYSRRLPKGVKHLKDFPI

SEQ ID NO: 1948 - protein, 21 aa, Homo sapiens
DVRPLYSRRLPKGVKHLKDFP

SEQ ID NO: 1949 - protein, 21 aa, Homo sapiens
TDVRPLYSRRLPKGVKHLKDF

SEQ ID NO: 1950 - protein, 21 aa, Homo sapiens
ITDVRPLYSRRLPKGVKHLKD

SEQ ID NO: 1951 - protein, 21 aa, Homo sapiens
GITDVRPLYSRRLPKGVKHLK

SEQ ID NO: 1952 - protein, 21 aa, Homo sapiens
GITDVRPLYSRRLPKGVKHLK

SEQ ID NO: 1953 - protein, 21 aa, Homo sapiens
PHGITDVRPLYSRRLPKGVKH

SEQ ID NO: 1954 - protein, 21 aa, Homo sapiens
YPHGITDVRPLYSRRLPKGVK

SEQ ID NO: 1955 - protein, 21 aa, Homo sapiens
IYPHGITDVRPLYSRRLPKGV

SEQ ID NO: 1956 - protein, 21 aa, Homo sapiens
NIYPHGITDVRPLYSRRLPKG

SEQ ID NO: 1957 - protein, 21 aa, Homo sapiens
YNIYPHGITDVRPLYSRRLPK

SEQ ID NO: 1958 - protein, 21 aa, Homo sapiens
PYNIYPHGITDVRPLYSRRLP

SEQ ID NO: 1959 - protein, 21 aa, Homo sapiens
RPYNIYPHGITDVRPLYSRRL

SEQ ID NO: 1960 - protein, 21 aa, Homo sapiens
SRPYNIYPHGITDVRPLYSRR

SEQ ID NO: 1961 - protein, 21 aa, Homo sapiens
ASRPYNIYPHGITDVRPLYSR

SEQ ID NO: 1962 - protein, 21 aa, Homo sapiens
QASRPYNIYPHGITDVRPLYS

SEQ ID NO: 1963 - protein, 21 aa, Homo sapiens
NQASRPYNIYPHGITDVRPLY

SEQ ID NO: 1964 - protein, 21 aa, Homo sapiens
KNQASRPYNIYPHGITDVRPL

SEQ ID NO: 1965 - protein, 21 aa, Homo sapiens
FKNQASRPYNIYPHGITDVRP

SEQ ID NO: 1966 - protein, 21 aa, Homo sapiens
IFKNQASRPYNIYPHGITDVR

SEQ ID NO: 1967 - protein, 21 aa, Homo sapiens
HPLYSRRLPKGVKHLKDFPIL

SEQ ID NO: 1968 - protein, 21 aa, Homo sapiens
VHPLYSRRLPKGVKHLKDFPI

SEQ ID NO: 1969 - protein, 21 aa, Homo sapiens
DVHPLYSRRLPKGVKHLKDFP

SEQ ID NO: 1970 - protein, 21 aa, Homo sapiens
TDVHPLYSRRLPKGVKHLKDF

SEQ ID NO: 1971 - protein, 21 aa, Homo sapiens
ITDVHPLYSRRLPKGVKHLKD

SEQ ID NO: 1972 - protein, 21 aa, Homo sapiens
GITDVHPLYSRRLPKGVKHLK

SEQ ID NO: 1973 - protein, 21 aa, Homo sapiens
HGITDVHPLYSRRLPKGVKHL

SEQ ID NO: 1974 - protein, 21 aa, Homo sapiens [sequence omitted]

SEQ ID NO: 1975 - protein, 21 aa, Homo sapiens [sequence omitted]

SEQ ID NO: 1976 - protein, 21 aa, Homo sapiens
IYPHGITDVHPLYSRRLPKGV

SEQ ID NO: 1977 - protein, 21 aa, Homo sapiens
NIYPHGITDVHPLYSRRLPKG

SEQ ID NO: 1978 - protein, 21 aa, Homo sapiens
YNIYPHGITDVHPLYSRRLPK

SEQ ID NO: 1979 - protein, 21 aa, Homo sapiens
PYNIYPHGITDVHPLYSRRLP

SEQ ID NO: 1980 - protein, 21 aa, Homo sapiens
RPYNIYPHGITDVHPLYSRRL

SEQ ID NO: 1981 - protein, 21 aa, Homo sapiens [sequence omitted]

SEQ ID NO: 1982 - protein, 21 aa, Homo sapiens
ASRPYNIYPHGITDVHPLYSR

SEQ ID NO: 1983 - protein, 21 aa, Homo sapiens
QASRPYNIYPHGITDVHPLYS

SEQ ID NO: 1984 - protein, 21 aa, Homo sapiens
NQASRPYNIYPHGITDVHPLY

SEQ ID NO: 1985 - protein, 21 aa, Homo sapiens
KNQASRPYNIYPHGITDVHPL

SEQ ID NO: 1986 - protein, 21 aa, Homo sapiens
FKNQASRPYNIYPHGITDVHP

SEQ ID NO: 1987 - protein, 21 aa, Homo sapiens
IFKNQASRPYNIYPHGITDVH

SEQ ID NO: 1988 - protein, 21 aa, Homo sapiens
RTPMPKIQNVSSSDLLMLLRQ

SEQ ID NO: 1989 - protein, 21 aa, Homo sapiens
HRTPMPKIQNVSSSDLLMLLR

SEQ ID NO: 1990 - protein, 21 aa, Homo sapiens
AHRTPMPKIQNVSSSDLLMLL

SEQ ID NO: 1991 - protein, 21 aa, Homo sapiens
FAHRTPMPKIQNVSSSDLLML

SEQ ID NO: 1992 - protein, 21 aa, Homo sapiens
WFAHRTPMPKIQNVSSSDLLM

SEQ ID NO: 1993 - protein, 21 aa, Homo sapiens
PWFAHRTPMPKIQNVSSSDLL

SEQ ID NO: 1994 - protein, 21 aa, Homo sapiens
DPWFAHRTPMPKIQNVSSSDL

SEQ ID NO: 1995 - protein, 21 aa, Homo sapiens
TDPWFAHRTPMPKIQNVSSSD

SEQ ID NO: 1996 - protein, 21 aa, Homo sapiens
KTDPWFAHRTPMPKIQNVSSS

SEQ ID NO: 1997 - protein, 21 aa, Homo sapiens
EKTDPWFAHRTPMPKIQNVSS

SEQ ID NO: 1998 - protein, 21 aa, Homo sapiens
IEKTDPWFAHRTPMPKIQNVS

SEQ ID NO: 1999 - protein, 21 aa, Homo sapiens
DIEKTDPWFAHRTPMPKIQNV

SEQ ID NO: 2000 - protein, 21 aa, Homo sapiens
NDIEKTDPWFAHRTPMPKIQN

SEQ ID NO: 2001 - protein, 21 aa, Homo sapiens
ENDIEKTDPWFAHRTPMPKIQ

SEQ ID NO: 2002 - protein, 21 aa, Homo sapiens
PENDIEKTDPWFAHRTPMPKI

SEQ ID NO: 2003 - protein, 21 aa, Homo sapiens
IPENDIEKTDPWFAHRTPMPK

SEQ ID NO: 2004 - protein, 21 aa, Homo sapiens
TIPENDIEKTDPWFAHRTPMP

SEQ ID NO: 2005 - protein, 21 aa, Homo sapiens
TTIPENDIEKTDPWFAHRTPM

SEQ ID NO: 2006 - protein, 21 aa, Homo sapiens
ATTIPENDIEKTDPWFAHRTP

SEQ ID NO: 2007 - protein, 21 aa, Homo sapiens
NATTIPENDIEKTDPWFAHRT

SEQ ID NO: 2008 - protein, 21 aa, Homo sapiens
FNATTIPENDIEKTDPWFAHR

SEQ ID NO: 2009 - protein, 21 aa, Homo sapiens [sequence omitted]

SEQ ID NO: 2010 - protein, 21 aa, Homo sapiens
HGTPMPKIQNVSSSDLLMLLR

SEQ ID NO: 2011 - protein, 21 aa, Homo sapiens
AHGTPMPKIQNVSSSDLLMLL

SEQ ID NO: 2012 - protein, 21 aa, Homo sapiens
FAHGTPMPKIQNVSSSDLLML

SEQ ID NO: 2013 - protein, 21 aa, Homo sapiens
WFAHGTPMPKIQNVSSSDLLM

SEQ ID NO: 2014 - protein, 21 aa, Homo sapiens
PWFAHGTPMPKIQNVSSSDLL

SEQ ID NO: 2015 - protein, 21 aa, Homo sapiens [sequence omitted]

SEQ ID NO: 2016 - protein, 21 aa, Homo sapiens [sequence omitted]

SEQ ID NO: 2017 - protein, 21 aa, Homo sapiens
KTDPWFAHGTPMPKIQNVSSS

SEQ ID NO: 2018 - protein, 21 aa, Homo sapiens
EKTDPWFAHGTPMPKIQNVSS

SEQ ID NO: 2019 - protein, 21 aa, Homo sapiens [sequence omitted]

SEQ ID NO: 2020 - protein, 21 aa, Homo sapiens
DIEKTDPWFAHGTPMPKIQNV

SEQ ID NO: 2021 - protein, 21 aa, Homo sapiens
NDIEKTDPWFAHGTPMPKIQN

SEQ ID NO: 2022 - protein, 21 aa, Homo sapiens [sequence omitted]

SEQ ID NO: 2023 - protein, 21 aa, Homo sapiens
PENDIEKTDPWFAHGTPMPKI

SEQ ID NO: 2024 - protein, 21 aa, Homo sapiens
IPENDIEKTDPWFAHGTPMPK

SEQ ID NO: 2025 - protein, 21 aa, Homo sapiens
TIPENDIEKTDPWFAHGTPMP

SEQ ID NO: 2026 - protein, 21 aa, Homo sapiens
TTIPENDIEKTDPWFAHGTPM

SEQ ID NO: 2027 - protein, 21 aa, Homo sapiens
ATTIPENDIEKTDPWFAHGTP

SEQ ID NO: 2028 - protein, 21 aa, Homo sapiens
NATTIPENDIEKTDPWFAHGT

SEQ ID NO: 2029 - protein, 21 aa, Homo sapiens
FNATTIPENDIEKTDPWFAHG

SEQ ID NO: 2030 - protein, 21 aa, Homo sapiens
RWIQRTHGKNSLNSGQGPSPK

SEQ ID NO: 2031 - protein, 21 aa, Homo sapiens
ARWIQRTHGKNSLNSGQGPSP

SEQ ID NO: 2032 - protein, 21 aa, Homo sapiens
SARWIQRTHGKNSLNSGQGPS

SEQ ID NO: 2033 - protein, 21 aa, Homo sapiens
ESARWIQRTHGKNSLNSGQGP

SEQ ID NO: 2034 - protein, 21 aa, Homo sapiens
PESARWIQRTHGKNSLNSGQG

SEQ ID NO: 2035 - protein, 21 aa, Homo sapiens
LPESARWIQRTHGKNSLNSGQ

SEQ ID NO: 2036 - protein, 21 aa, Homo sapiens
FLPESARWIQRTHGKNSLNSG

SEQ ID NO: 2037 - protein, 21 aa, Homo sapiens
LFLPESARWIQRTHGKNSLNS

SEQ ID NO: 2038 - protein, 21 aa, Homo sapiens
MLFLPESARWIQRTHGKNSLN

SEQ ID NO: 2039 - protein, 21 aa, Homo sapiens
KMLFLPESARWIQRTHGKNSL

SEQ ID NO: 2040 - protein, 21 aa, Homo sapiens
FKMLFLPESARWIQRTHGKNS

SEQ ID NO: 2041 - protein, 21 aa, Homo sapiens
FFKMLFLPESARWIQRTHGKN

SEQ ID NO: 2042 - protein, 21 aa, Homo sapiens
SFFKMLFLPESARWIQRTHGK

SEQ ID NO: 2043 - protein, 21 aa, Homo sapiens
MSFFKMLFLPESARWIQRTHG

SEQ ID NO: 2044 - protein, 21 aa, Homo sapiens
DMSFFKMLFLPESARWIQRTH

SEQ ID NO: 2045 - protein, 21 aa, Homo sapiens
PDMSFFKMLFLPESARWIQRT

SEQ ID NO: 2046 - protein, 21 aa, Homo sapiens
NPDMSFFKMLFLPESARWIQR

SEQ ID NO: 2047 - protein, 21 aa, Homo sapiens
QNPDMSFFKMLFLPESARWIQ

SEQ ID NO: 2048 - protein, 21 aa, Homo sapiens
AQNPDMSFFKMLFLPESARWI

SEQ ID NO: 2049 - protein, 21 aa, Homo sapiens
DAQNPDMSFFKMLFLPESARW

SEQ ID NO: 2050 - protein, 21 aa, Homo sapiens
PDAQNPDMSFFKMLFLPESAR

SEQ ID NO: 2051 - protein, 21 aa, Homo sapiens
WWIQRTHGKNSLNSGQGPSPK

SEQ ID NO: 2052 - protein, 21 aa, Homo sapiens
AWWIQRTHGKNSLNSGQGPSP

SEQ ID NO: 2053 - protein, 21 aa, Homo sapiens
SAWWIQRTHGKNSLNSGQGPS

SEQ ID NO: 2054 - protein, 21 aa, Homo sapiens
ESAWWIQRTHGKNSLNSGQGP

SEQ ID NO: 2055 - protein, 21 aa, Homo sapiens
PESAWWIQRTHGKNSLNSGQG

SEQ ID NO: 2056 - protein, 21 aa, Homo sapiens
LPESAWWIQRTHGKNSLNSGQ

SEQ ID NO: 2057 - protein, 21 aa, Homo sapiens
FLPESAWWIQRTHGKNSLNSG

SEQ ID NO: 2058 - protein, 21 aa, Homo sapiens
LFLPESAWWIQRTHGKNSLNS

SEQ ID NO: 2059 - protein, 21 aa, Homo sapiens
MLFLPESAWWIQRTHGKNSLN

SEQ ID NO: 2060 - protein, 21 aa, Homo sapiens
KMLFLPESAWWIQRTHGKNSL

SEQ ID NO: 2061 - protein, 21 aa, Homo sapiens [sequence omitted]

SEQ ID NO: 2062 - protein, 21 aa, Homo sapiens
FFKMLFLPESAWWIQRTHGKN

SEQ ID NO: 2063 - protein, 21 aa, Homo sapiens
SFFKMLFLPESAWWIQRTHGK

SEQ ID NO: 2064 - protein, 21 aa, Homo sapiens
MSFFKMLFLPESAWWIQRTHG

SEQ ID NO: 2065 - protein, 21 aa, Homo sapiens
DMSFFKMLFLPESAWWIQRTH

SEQ ID NO: 2066 - protein, 21 aa, Homo sapiens
PDMSFFKMLFLPESAWWIQRT

SEQ ID NO: 2067 - protein, 21 aa, Homo sapiens
NPDMSFFKMLFLPESAWWIQR

SEQ ID NO: 2068 - protein, 21 aa, Homo sapiens
QNPDMSFFKMLFLPESAWWIQ

SEQ ID NO: 2069 - protein, 21 aa, Homo sapiens
AQNPDMSFFKMLFLPESAWWI

SEQ ID NO: 2070 - protein, 21 aa, Homo sapiens
DAQNPDMSFFKMLFLPESAWW

SEQ ID NO: 2071 - protein, 21 aa, Homo sapiens
PDAQNPDMSFFKMLFLPESAW

SEQ ID NO: 2072 - protein, 21 aa, Homo sapiens
DGAYAPVLQDFRSLNDSTNRT

SEQ ID NO: 2073 - protein, 21 aa, Homo sapiens
YDGAYAPVLQDFRSLNDSTNR

SEQ ID NO: 2074 - protein, 21 aa, Homo sapiens
SYDGAYAPVLQDFRSLNDSTN

SEQ ID NO: 2075 - protein, 21 aa, Homo sapiens
GSYDGAYAPVLQDFRSLNDST

SEQ ID NO: 2076 - protein, 21 aa, Homo sapiens
EGSYDGAYAPVLQDFRSLNDS

SEQ ID NO: 2077 - protein, 21 aa, Homo sapiens
VEGSYDGAYAPVLQDFRSLND

SEQ ID NO: 2078 - protein, 21 aa, Homo sapiens
NVEGSYDGAYAPVLQDFRSLN

SEQ ID NO: 2079 - protein, 21 aa, Homo sapiens
QNVEGSYDGAYAPVLQDFRSL

SEQ ID NO: 2080 - protein, 21 aa, Homo sapiens
RQNVEGSYDGAYAPVLQDFRS

SEQ ID NO: 2081 - protein, 21 aa, Homo sapiens
TRQNVEGSYDGAYAPVLQDFR

SEQ ID NO: 2082 - protein, 21 aa, Homo sapiens
STRQNVEGSYDGAYAPVLQDF

SEQ ID NO: 2083 - protein, 21 aa, Homo sapiens
LSTRQNVEGSYDGAYAPVLQD

SEQ ID NO: 2084 - protein, 21 aa, Homo sapiens
LLSTRQNVEGSYDGAYAPVLQ

SEQ ID NO: 2085 - protein, 21 aa, Homo sapiens
FLLSTRQNVEGSYDGAYAPVL

SEQ ID NO: 2086 - protein, 21 aa, Homo sapiens
LFLLSTRQNVEGSYDGAYAPV

SEQ ID NO: 2087 - protein, 21 aa, Homo sapiens
NLFLLSTRQNVEGSYDGAYAP

SEQ ID NO: 2088 - protein, 21 aa, Homo sapiens
KNLFLLSTRQNVEGSYDGAYA

SEQ ID NO: 2089 - protein, 21 aa, Homo sapiens
MKNLFLLSTRQNVEGSYDGAY

SEQ ID NO: 2090 - protein, 21 aa, Homo sapiens
FMKNLFLLSTRQNVEGSYDGA

SEQ ID NO: 2091 - protein, 21 aa, Homo sapiens
NFMKNLFLLSTRQNVEGSYDG

SEQ ID NO: 2092 - protein, 21 aa, Homo sapiens
KNFMKNLFLLSTRQNVEGSYD

SEQ ID NO: 2093 - protein, 21 aa, Homo sapiens
EGAYAPVLQDFRSLNDSTNRT

SEQ ID NO: 2094 - protein, 21 aa, Homo sapiens
YEGAYAPVLQDFRSLNDSTNR

SEQ ID NO: 2095 - protein, 21 aa, Homo sapiens
SYEGAYAPVLQDFRSLNDSTN

SEQ ID NO: 2096 - protein, 21 aa, Homo sapiens
GSYEGAYAPVLQDFRSLNDST

SEQ ID NO: 2097 - protein, 21 aa, Homo sapiens
EGSYEGAYAPVLQDFRSLNDS

SEQ ID NO: 2098 - protein, 21 aa, Homo sapiens
VEGSYEGAYAPVLQDFRSLND

SEQ ID NO: 2099 - protein, 21 aa, Homo sapiens
NVEGSYEGAYAPVLQDFRSLN

SEQ ID NO: 2100 - protein, 21 aa, Homo sapiens
QNVEGSYEGAYAPVLQDFRSL

SEQ ID NO: 2101 - protein, 21 aa, Homo sapiens
RQNVEGSYEGAYAPVLQDFRS

SEQ ID NO: 2102 - protein, 21 aa, Homo sapiens
TRQNVEGSYEGAYAPVLQDFR

SEQ ID NO: 2103 - protein, 21 aa, Homo sapiens
STRQNVEGSYEGAYAPVLQDF

SEQ ID NO: 2104 - protein, 21 aa, Homo sapiens
LSTRQNVEGSYEGAYAPVLQD

SEQ ID NO: 2105 - protein, 21 aa, Homo sapiens
LLSTRQNVEGSYEGAYAPVLQ

SEQ ID NO: 2106 - protein, 21 aa, Homo sapiens
FLLSTRQNVEGSYEGAYAPVL

SEQ ID NO: 2107 - protein, 21 aa, Homo sapiens
LFLLSTRQNVEGSYEGAYAPV

SEQ ID NO: 2108 - protein, 21 aa, Homo sapiens
NLFLLSTRQNVEGSYEGAYAP

SEQ ID NO: 2109 - protein, 21 aa, Homo sapiens
KNLFLLSTRQNVEGSYEGAYA

SEQ ID NO: 2110 - protein, 21 aa, Homo sapiens
MKNLFLLSTRQNVEGSYEGAY

SEQ ID NO: 2111 - protein, 21 aa, Homo sapiens
FMKNLFLLSTRQNVEGSYEGA

SEQ ID NO: 2112 - protein, 21 aa, Homo sapiens
NFMKNLFLLSTRQNVEGSYEG

SEQ ID NO: 2113 - protein, 21 aa, Homo sapiens
KNFMKNLFLLSTRQNVEGSYE

SEQ ID NO: 2114 - protein, 21 aa, Homo sapiens
RTKKHTAHFSKKGEEENLEGL

SEQ ID NO: 2115 - protein, 21 aa, Homo sapiens
NRTKKHTAHFSKKGEEENLEG

SEQ ID NO: 2116 - protein, 21 aa, Homo sapiens
TNRTKKHTAHFSKKGEEENLE

SEQ ID NO: 2117 - protein, 21 aa, Homo sapiens
STNRTKKHTAHFSKKGEEENL

SEQ ID NO: 2118 - protein, 21 aa, Homo sapiens
DSTNRTKKHTAHFSKKGEEEN

SEQ ID NO: 2119 - protein, 21 aa, Homo sapiens
NDSTNRTKKHTAHFSKKGEEE

SEQ ID NO: 2120 - protein, 21 aa, Homo sapiens
LNDSTNRTKKHTAHFSKKGEE

SEQ ID NO: 2121 - protein, 21 aa, Homo sapiens
SLNDSTNRTKKHTAHFSKKGE

SEQ ID NO: 2122 - protein, 21 aa, Homo sapiens
RSLNDSTNRTKKHTAHFSKKG

SEQ ID NO: 2123 - protein, 21 aa, Homo sapiens
FRSLNDSTNRTKKHTAHFSKK

SEQ ID NO: 2124 - protein, 21 aa, Homo sapiens
DFRSLNDSTNRTKKHTAHFSK

SEQ ID NO: 2125 - protein, 21 aa, Homo sapiens
QDFRSLNDSTNRTKKHTAHFS

SEQ ID NO: 2126 - protein, 21 aa, Homo sapiens
LQDFRSLNDSTNRTKKHTAHF

SEQ ID NO: 2127 - protein, 21 aa, Homo sapiens
VLQDFRSLNDSTNRTKKHTAH

SEQ ID NO: 2128 - protein, 21 aa, Homo sapiens
PVLQDFRSLNDSTNRTKKHTA

SEQ ID NO: 2129 - protein, 21 aa, Homo sapiens
APVLQDFRSLNDSTNRTKKHT

SEQ ID NO: 2130 - protein, 21 aa, Homo sapiens
YAPVLQDFRSLNDSTNRTKKH

SEQ ID NO: 2131 - protein, 21 aa, Homo sapiens
AYAPVLQDFRSLNDSTNRTKK

SEQ ID NO: 2132 - protein, 21 aa, Homo sapiens
GAYAPVLQDFRSLNDSTNRTK

SEQ ID NO: 2133 - protein, 21 aa, Homo sapiens
DGAYAPVLQDFRSLNDSTNRT

SEQ ID NO: 2134 - protein, 21 aa, Homo sapiens
YDGAYAPVLQDFRSLNDSTNR

SEQ ID NO: 2135 - protein, 21 aa, Homo sapiens
KTKKHTAHFSKKGEEENLEGL

SEQ ID NO: 2136 - protein, 21 aa, Homo sapiens
NKTKKHTAHFSKKGEEENLEG

SEQ ID NO: 2137 - protein, 21 aa, Homo sapiens
TNKTKKHTAHFSKKGEEENLE

SEQ ID NO: 2138 - protein, 21 aa, Homo sapiens
STNKTKKHTAHFSKKGEEENL

SEQ ID NO: 2139 - protein, 21 aa, Homo sapiens
DSTNKTKKHTAHFSKKGEEEN

SEQ ID NO: 2140 - protein, 21 aa, Homo sapiens
NDSTNKTKKHTAHFSKKGEEE

SEQ ID NO: 2141 - protein, 21 aa, Homo sapiens
LNDSTNKTKKHTAHFSKKGEE

SEQ ID NO: 2142 - protein, 21 aa, Homo sapiens
SLNDSTNKTKKHTAHFSKKGE

SEQ ID NO: 2143 - protein, 21 aa, Homo sapiens
RSLNDSTNKTKKHTAHFSKKG

SEQ ID NO: 2144 - protein, 21 aa, Homo sapiens
FRSLNDSTNKTKKHTAHFSKK

SEQ ID NO: 2145 - protein, 21 aa, Homo sapiens
DFRSLNDSTNKTKKHTAHFSK

SEQ ID NO: 2146 - protein, 21 aa, Homo sapiens
QDFRSLNDSTNKTKKHTAHFS

SEQ ID NO: 2147 - protein, 21 aa, Homo sapiens
LQDFRSLNDSTNKTKKHTAHF

SEQ ID NO: 2148 - protein, 21 aa, Homo sapiens
VLQDFRSLNDSTNKTKKHTAH

SEQ ID NO: 2149 - protein, 21 aa, Homo sapiens
PVLQDFRSLNDSTNKTKKHTA

SEQ ID NO: 2150 - protein, 21 aa, Homo sapiens
APVLQDFRSLNDSTNKTKKHT

SEQ ID NO: 2151 - protein, 21 aa, Homo sapiens
YAPVLQDFRSLNDSTNKTKKH

SEQ ID NO: 2152 - protein, 21 aa, Homo sapiens
AYAPVLQDFRSLNDSTNKTKK

SEQ ID NO: 2153 - protein, 21 aa, Homo sapiens
GAYAPVLQDFRSLNDSTNKTK

SEQ ID NO: 2154 - protein, 21 aa, Homo sapiens
DGAYAPVLQDFRSLNDSTNKT

SEQ ID NO: 2155 - protein, 21 aa, Homo sapiens
YDGAYAPVLQDFRSLNDSTNK

SEQ ID NO: 2156 - protein, 21 aa, Homo sapiens
LGTSATNSVTYKKVENTVLPK

SEQ ID NO: 2157 - protein, 21 aa, Homo sapiens
SLGTSATNSVTYKKVENTVLP

SEQ ID NO: 2158 - protein, 21 aa, Homo sapiens
GSLGTSATNSVTYKKVENTVL

SEQ ID NO: 2159 - protein, 21 aa, Homo sapiens
VGSLGTSATNSVTYKKVENTV

SEQ ID NO: 2160 - protein, 21 aa, Homo sapiens
EVGSLGTSATNSVTYKKVENT

SEQ ID NO: 2161 - protein, 21 aa, Homo sapiens
REVGSLGTSATNSVTYKKVEN

SEQ ID NO: 2162 - protein, 21 aa, Homo sapiens
QREVGSLGTSATNSVTYKKVE

SEQ ID NO: 2163 - protein, 21 aa, Homo sapiens
DQREVGSLGTSATNSVTYKKV

SEQ ID NO: 2164 - protein, 21 aa, Homo sapiens
GDQREVGSLGTSATNSVTYKK

SEQ ID NO: 2165 - protein, 21 aa, Homo sapiens
TGDQREVGSLGTSATNSVTYK

SEQ ID NO: 2166 - protein, 21 aa, Homo sapiens
MTGDQREVGSLGTSATNSVTY

SEQ ID NO: 2167 - protein, 21 aa, Homo sapiens
EMTGDQREVGSLGTSATNSVT

SEQ ID NO: 2168 - protein, 21 aa, Homo sapiens
LEMTGDQREVGSLGTSATNSV

SEQ ID NO: 2169 - protein, 21 aa, Homo sapiens
TLEMTGDQREVGSLGTSATNS

SEQ ID NO: 2170 - protein, 21 aa, Homo sapiens
LTLEMTGDQREVGSLGTSATN

SEQ ID NO: 2171 - protein, 21 aa, Homo sapiens
ILTLEMTGDQREVGSLGTSAT

SEQ ID NO: 2172 - protein, 21 aa, Homo sapiens
AILTLEMTGDQREVGSLGTSA

SEQ ID NO: 2173 - protein, 21 aa, Homo sapiens
LAILTLEMTGDQREVGSLGTS

SEQ ID NO: 2174 - protein, 21 aa, Homo sapiens
SLAILTLEMTGDQREVGSLGT

SEQ ID NO: 2175 - protein, 21 aa, Homo sapiens
LSLAILTLEMTGDQREVGSLG

SEQ ID NO: 2176 - protein, 21 aa, Homo sapiens
NLSLAILTLEMTGDQREVGSL

SEQ ID NO: 2177 - protein, 21 aa, Homo sapiens
PGTSATNSVTYKKVENTVLPK

SEQ ID NO: 2178 - protein, 21 aa, Homo sapiens
SPGTSATNSVTYKKVENTVLP

SEQ ID NO: 2179 - protein, 21 aa, Homo sapiens [sequence omitted]

SEQ ID NO: 2180 - protein, 21 aa, Homo sapiens [sequence omitted]

SEQ ID NO: 2181 - protein, 21 aa, Homo sapiens
EVGSPGTSATNSVTYKKVENT

SEQ ID NO: 2182 - protein, 21 aa, Homo sapiens [sequence omitted]

SEQ ID NO: 2183 - protein, 21 aa, Homo sapiens [sequence omitted]

SEQ ID NO: 2184 - protein, 21 aa, Homo sapiens [sequence omitted]

SEQ ID NO: 2185 - protein, 21 aa, Homo sapiens [sequence omitted]

SEQ ID NO: 2186 - protein, 21 aa, Homo sapiens
TGDQREVGSPGTSATNSVTYK

SEQ ID NO: 2187 - protein, 21 aa, Homo sapiens
MTGDQREVGSPGTSATNSVTY

SEQ ID NO: 2188 - protein, 21 aa, Homo sapiens [sequence omitted]

SEQ ID NO: 2189 - protein, 21 aa, Homo sapiens
LEMTGDQREVGSPGTSATNSV

SEQ ID NO: 2190 - protein, 21 aa, Homo sapiens
TLEMTGDQREVGSPGTSATNS

SEQ ID NO: 2191 - protein, 21 aa, Homo sapiens [sequence omitted]

SEQ ID NO: 2192 - protein, 21 aa, Homo sapiens [sequence omitted]

SEQ ID NO: 2193 - protein, 21 aa, Homo sapiens
AILTLEMTGDQREVGSPGTSA

SEQ ID NO: 2194 - protein, 21 aa, Homo sapiens
LAILTLEMTGDQREVGSPGTS

SEQ ID NO: 2195 - protein, 21 aa, Homo sapiens [sequence omitted]

SEQ ID NO: 2196 - protein, 21 aa, Homo sapiens
LSLAILTLEMTGDQREVGSPG

SEQ ID NO: 2197 - protein, 21 aa, Homo sapiens
NLSLAILTLEMTGDQREVGSP

SEQ ID NO: 2198 - protein, 21 aa, Homo sapiens
ISVEMKKEDFDIYDEDENQSP

SEQ ID NO: 2199 - protein, 21 aa, Homo sapiens
TISVEMKKEDFDIYDEDENQS

SEQ ID NO: 2200 - protein, 21 aa, Homo sapiens
DTISVEMKKEDFDIYDEDENQ

SEQ ID NO: 2201 - protein, 21 aa, Homo sapiens
DDTISVEMKKEDFDIYDEDEN

SEQ ID NO: 2202 - protein, 21 aa, Homo sapiens
YDDTISVEMKKEDFDIYDEDE

SEQ ID NO: 2203 - protein, 21 aa, Homo sapiens
DYDDTISVEMKKEDFDIYDED

SEQ ID NO: 2204 - protein, 21 aa, Homo sapiens
IDYDDTISVEMKKEDFDIYDE

SEQ ID NO: 2205 - protein, 21 aa, Homo sapiens
EIDYDDTISVEMKKEDFDIYD

SEQ ID NO: 2206 - protein, 21 aa, Homo sapiens
EEIDYDDTISVEMKKEDFDIY

SEQ ID NO: 2207 - protein, 21 aa, Homo sapiens
QEEIDYDDTISVEMKKEDFDI

SEQ ID NO: 2208 - protein, 21 aa, Homo sapiens
DQEEIDYDDTISVEMKKEDFD

SEQ ID NO: 2209 - protein, 21 aa, Homo sapiens
SDQEEIDYDDTISVEMKKEDF

SEQ ID NO: 2210 - protein, 21 aa, Homo sapiens
QSDQEEIDYDDTISVEMKKED

SEQ ID NO: 2211 - protein, 21 aa, Homo sapiens
LQSDQEEIDYDDTISVEMKKE

SEQ ID NO: 2212 - protein, 21 aa, Homo sapiens
TLQSDQEEIDYDDTISVEMKK

SEQ ID NO: 2213 - protein, 21 aa, Homo sapiens
TTLQSDQEEIDYDDTISVEMK

SEQ ID NO: 2214 - protein, 21 aa, Homo sapiens
RTTLQSDQEEIDYDDTISVEM

SEQ ID NO: 2215 - protein, 21 aa, Homo sapiens
TRTTLQSDQEEIDYDDTISVE

SEQ ID NO: 2216 - protein, 21 aa, Homo sapiens
ITRTTLQSDQEEIDYDDTISV

SEQ ID NO: 2217 - protein, 21 aa, Homo sapiens
EITRTTLQSDQEEIDYDDTIS

SEQ ID NO: 2218 - protein, 21 aa, Homo sapiens
REITRTTLQSDQEEIDYDDTI

SEQ ID NO: 2219 - protein, 21 aa, Homo sapiens
VSVEMKKEDFDIYDEDENQSP

SEQ ID NO: 2220 - protein, 21 aa, Homo sapiens
TVSVEMKKEDFDIYDEDENQS

SEQ ID NO: 2221 - protein, 21 aa, Homo sapiens
DTVSVEMKKEDFDIYDEDENQ

SEQ ID NO: 2222 - protein, 21 aa, Homo sapiens
DDTVSVEMKKEDFDIYDEDEN

SEQ ID NO: 2223 - protein, 21 aa, Homo sapiens
YDDTVSVEMKKEDFDIYDEDE

SEQ ID NO: 2224 - protein, 21 aa, Homo sapiens
DYDDTVSVEMKKEDFDIYDED

SEQ ID NO: 2225 - protein, 21 aa, Homo sapiens
IDYDDTVSVEMKKEDFDIYDE

SEQ ID NO: 2226 - protein, 21 aa, Homo sapiens
EIDYDDTVSVEMKKEDFDIYD

SEQ ID NO: 2227 - protein, 21 aa, Homo sapiens
EEIDYDDTVSVEMKKEDFDIY

SEQ ID NO: 2228 - protein, 21 aa, Homo sapiens
QEEIDYDDTVSVEMKKEDFDI

SEQ ID NO: 2229 - protein, 21 aa, Homo sapiens
DQEEIDYDDTVSVEMKKEDFD

SEQ ID NO: 2230 - protein, 21 aa, Homo sapiens
SDQEEIDYDDTVSVEMKKEDF

SEQ ID NO: 2231 - protein, 21 aa, Homo sapiens
QSDQEEIDYDDTVSVEMKKED

SEQ ID NO: 2232 - protein, 21 aa, Homo sapiens
LQSDQEEIDYDDTVSVEMKKE

SEQ ID NO: 2233 - protein, 21 aa, Homo sapiens
TLQSDQEEIDYDDTVSVEMKK

SEQ ID NO: 2234 - protein, 21 aa, Homo sapiens
TTLQSDQEEIDYDDTVSVEMK

SEQ ID NO: 2235 - protein, 21 aa, Homo sapiens
RTTLQSDQEEIDYDDTVSVEM

SEQ ID NO: 2236 - protein, 21 aa, Homo sapiens
TRTTLQSDQEEIDYDDTVSVE

SEQ ID NO: 2237 - protein, 21 aa, Homo sapiens
ITRTTLQSDQEEIDYDDTVSV

SEQ ID NO: 2238 - protein, 21 aa, Homo sapiens
EITRTTLQSDQEEIDYDDTVS

SEQ ID NO: 2239 - protein, 21 aa, Homo sapiens
REITRTTLQSDQEEIDYDDTV

SEQ ID NO: 2240 - protein, 21 aa, Homo sapiens
EHLHAGMSTLFLVYSNKCQTP

SEQ ID NO: 2241 - protein, 21 aa, Homo sapiens
GEHLHAGMSTLFLVYSNKCQT

SEQ ID NO: 2242 - protein, 21 aa, Homo sapiens
IGEHLHAGMSTLFLVYSNKCQ

SEQ ID NO: 2243 - protein, 21 aa, Homo sapiens
LIGEHLHAGMSTLFLVYSNKC

SEQ ID NO: 2244 - protein, 21 aa, Homo sapiens
CLIGEHLHAGMSTLFLVYSNK

SEQ ID NO: 2245 - protein, 21 aa, Homo sapiens
ECLIGEHLHAGMSTLFLVYSN

SEQ ID NO: 2246 - protein, 21 aa, Homo sapiens
VECLIGEHLHAGMSTLFLVYS

SEQ ID NO: 2247 - protein, 21 aa, Homo sapiens
RVECLIGEHLHAGMSTLFLVY

SEQ ID NO: 2248 - protein, 21 aa, Homo sapiens
WRVECLIGEHLHAGMSTLFLV

SEQ ID NO: 2249 - protein, 21 aa, Homo sapiens
IWRVECLIGEHLHAGMSTLFL

SEQ ID NO: 2250 - protein, 21 aa, Homo sapiens
GIWRVECLIGEHLHAGMSTLF

SEQ ID NO: 2251 - protein, 21 aa, Homo sapiens
AGIWRVECLIGEHLHAGMSTL

SEQ ID NO: 2252 - protein, 21 aa, Homo sapiens
KAGIWRVECLIGEHLHAGMST

SEQ ID NO: 2253 - protein, 21 aa, Homo sapiens
SKAGIWRVECLIGEHLHAGMS

SEQ ID NO: 2254 - protein, 21 aa, Homo sapiens
PSKAGIWRVECLIGEHLHAGM

SEQ ID NO: 2255 - protein, 21 aa, Homo sapiens
LPSKAGIWRVECLIGEHLHAG

SEQ ID NO: 2256 - protein, 21 aa, Homo sapiens
MLPSKAGIWRVECLIGEHLHA

SEQ ID NO: 2257 - protein, 21 aa, Homo sapiens
EMLPSKAGIWRVECLIGEHLH

SEQ ID NO: 2258 - protein, 21 aa, Homo sapiens
VEMLPSKAGIWRVECLIGEHL

SEQ ID NO: 2259 - protein, 21 aa, Homo sapiens
TVEMLPSKAGIWRVECLIGEH

SEQ ID NO: 2260 - protein, 21 aa, Homo sapiens
ETVEMLPSKAGIWRVECLIGE

SEQ ID NO: 2261 - protein, 21 aa, Homo sapiens
KHLHAGMSTLFLVYSNKCQTP

SEQ ID NO: 2262 - protein, 21 aa, Homo sapiens [sequence omitted]

SEQ ID NO: 2263 - protein, 21 aa, Homo sapiens
IGKHLHAGMSTLFLVYSNKCQ

SEQ ID NO: 2264 - protein, 21 aa, Homo sapiens
LIGKHLHAGMSTLFLVYSNKC

SEQ ID NO: 2265 - protein, 21 aa, Homo sapiens
CLIGKHLHAGMSTLFLVYSNK

SEQ ID NO: 2266 - protein, 21 aa, Homo sapiens
ECLIGKHLHAGMSTLFLVYSN

SEQ ID NO: 2267 - protein, 21 aa, Homo sapiens
VECLIGKHLHAGMSTLFLVYS

SEQ ID NO: 2268 - protein, 21 aa, Homo sapiens
RVECLIGKHLHAGMSTLFLVY

SEQ ID NO: 2269 - protein, 21 aa, Homo sapiens
WRVECLIGKHLHAGMSTLFLV

SEQ ID NO: 2270 - protein, 21 aa, Homo sapiens
IWRVECLIGKHLHAGMSTLFL

SEQ ID NO: 2271 - protein, 21 aa, Homo sapiens
GIWRVECLIGKHLHAGMSTLF

SEQ ID NO: 2272 - protein, 21 aa, Homo sapiens
AGIWRVECLIGKHLHAGMSTL

SEQ ID NO: 2273 - protein, 21 aa, Homo sapiens
KAGIWRVECLIGKHLHAGMST

SEQ ID NO: 2274 - protein, 21 aa, Homo sapiens
SKAGIWRVECLIGKHLHAGMS

SEQ ID NO: 2275 - protein, 21 aa, Homo sapiens
PSKAGIWRVECLIGKHLHAGM

SEQ ID NO: 2276 - protein, 21 aa, Homo sapiens
LPSKAGIWRVECLIGKHLHAG

SEQ ID NO: 2277 - protein, 21 aa, Homo sapiens
MLPSKAGIWRVECLIGKHLHA

SEQ ID NO: 2278 - protein, 21 aa, Homo sapiens
EMLPSKAGIWRVECLIGKHLH

SEQ ID NO: 2279 - protein, 21 aa, Homo sapiens
VEMLPSKAGIWRVECLIGKHL

SEQ ID NO: 2280 - protein, 21 aa, Homo sapiens
TVEMLPSKAGIWRVECLIGKH

SEQ ID NO: 2281 - protein, 21 aa, Homo sapiens
ETVEMLPSKAGIWRVECLIGK

SEQ ID NO: 2282 - protein, 21 aa, Homo sapiens
VNNPKEWLQVDFQKTMKVTGV

SEQ ID NO: 2283 - protein, 21 aa, Homo sapiens
QVNNPKEWLQVDFQKTMKVTG

SEQ ID NO: 2284 - protein, 21 aa, Homo sapiens
PQVNNPKEWLQVDFQKTMKVT

SEQ ID NO: 2285 - protein, 21 aa, Homo sapiens
RPQVNNPKEWLQVDFQKTMKV

SEQ ID NO: 2286 - protein, 21 aa, Homo sapiens
WRPQVNNPKEWLQVDFQKTMK

SEQ ID NO: 2287 - protein, 21 aa, Homo sapiens
AWRPQVNNPKEWLQVDFQKTM

SEQ ID NO: 2288 - protein, 21 aa, Homo sapiens
NAWRPQVNNPKEWLQVDFQKT

SEQ ID NO: 2289 - protein, 21 aa, Homo sapiens
SNAWRPQVNNPKEWLQVDFQK

SEQ ID NO: 2290 - protein, 21 aa, Homo sapiens
RSNAWRPQVNNPKEWLQVDFQ

SEQ ID NO: 2291 - protein, 21 aa, Homo sapiens
GRSNAWRPQVNNPKEWLQVDF

SEQ ID NO: 2292 - protein, 21 aa, Homo sapiens
QGRSNAWRPQVNNPKEWLQVD

SEQ ID NO: 2293 - protein, 21 aa, Homo sapiens
LQGRSNAWRPQVNNPKEWLQV

SEQ ID NO: 2294 - protein, 21 aa, Homo sapiens
HLQGRSNAWRPQVNNPKEWLQ

SEQ ID NO: 2295 - protein, 21 aa, Homo sapiens
LHLQGRSNAWRPQVNNPKEWL

SEQ ID NO: 2296 - protein, 21 aa, Homo sapiens
RLHLQGRSNAWRPQVNNPKEW

SEQ ID NO: 2297 - protein, 21 aa, Homo sapiens
ARLHLQGRSNAWRPQVNNPKE

SEQ ID NO: 2298 - protein, 21 aa, Homo sapiens
KARLHLQGRSNAWRPQVNNPK

SEQ ID NO: 2299 - protein, 21 aa, Homo sapiens
SKARLHLQGRSNAWRPQVNNP

SEQ ID NO: 2300 - protein, 21 aa, Homo sapiens
PSKARLHLQGRSNAWRPQVNN

SEQ ID NO: 2301 - protein, 21 aa, Homo sapiens
SPSKARLHLQGRSNAWRPQVN

SEQ ID NO: 2302 - protein, 21 aa, Homo sapiens
WSPSKARLHLQGRSNAWRPQV

SEQ ID NO: 2303 - protein, 21 aa, Homo sapiens
MNNPKEWLQVDFQKTMKVTGV

SEQ ID NO: 2304 - protein, 21 aa, Homo sapiens
QMNNPKEWLQVDFQKTMKVTG

SEQ ID NO: 2305 - protein, 21 aa, Homo sapiens
PQMNNPKEWLQVDFQKTMKVT

SEQ ID NO: 2306 - protein, 21 aa, Homo sapiens
RPQMNNPKEWLQVDFQKTMKV

SEQ ID NO: 2307 - protein, 21 aa, Homo sapiens
WRPQMNNPKEWLQVDFQKTMK

SEQ ID NO: 2308 - protein, 21 aa, Homo sapiens
AWRPQMNNPKEWLQVDFQKTM

SEQ ID NO: 2309 - protein, 21 aa, Homo sapiens
NAWRPQMNNPKEWLQVDFQKT

SEQ ID NO: 2310 - protein, 21 aa, Homo sapiens
SNAWRPQMNNPKEWLQVDFQK

SEQ ID NO: 2311 - protein, 21 aa, Homo sapiens
RSNAWRPQMNNPKEWLQVDFQ

SEQ ID NO: 2312 - protein, 21 aa, Homo sapiens
GRSNAWRPQMNNPKEWLQVDF

SEQ ID NO: 2313 - protein, 21 aa, Homo sapiens [sequence omitted]

SEQ ID NO: 2314 - protein, 21 aa, Homo sapiens
LQGRSNAWRPQMNNPKEWLQV

SEQ ID NO: 2315 - protein, 21 aa, Homo sapiens
HLQGRSNAWRPQMNNPKEWLQ

SEQ ID NO: 2316 - protein, 21 aa, Homo sapiens [sequence omitted]

SEQ ID NO: 2317 - protein, 21 aa, Homo sapiens
RLHLQGRSNAWRPQMNNPKEW

SEQ ID NO: 2318 - protein, 21 aa, Homo sapiens
ARLHLQGRSNAWRPQMNNPKE

SEQ ID NO: 2319 - protein, 21 aa, Homo sapiens
KARLHLQGRSNAWRPQMNNPK

SEQ ID NO: 2320 - protein, 21 aa, Homo sapiens
SKARLHLQGRSNAWRPQMNNP

SEQ ID NO: 2321 - protein, 21 aa, Homo sapiens
PSKARLHLQGRSNAWRPQMNN

SEQ ID NO: 2322 - protein, 21 aa, Homo sapiens
SPSKARLHLQGRSNAWRPQMN

SEQ ID NO: 2323 - protein, 21 aa, Homo sapiens
WSPSKARLHLQGRSNAWRPQM

SEQ ID NO: 2324 - protein, 21 aa, Homo sapiens
MKVTGVTTQGVKSLLTSMYVK

SEQ ID NO: 2325 - protein, 21 aa, Homo sapiens
TMKVTGVTTQGVKSLLTSMYV

SEQ ID NO: 2326 - protein, 21 aa, Homo sapiens
KTMKVTGVTTQGVKSLLTSMY

SEQ ID NO: 2327 - protein, 21 aa, Homo sapiens
QKTMKVTGVTTQGVKSLLTSM

SEQ ID NO: 2328 - protein, 21 aa, Homo sapiens
FQKTMKVTGVTTQGVKSLLTS

SEQ ID NO: 2329 - protein, 21 aa, Homo sapiens
DFQKTMKVTGVTTQGVKSLLT

SEQ ID NO: 2330 - protein, 21 aa, Homo sapiens
VDFQKTMKVTGVTTQGVKSLL

SEQ ID NO: 2331 - protein, 21 aa, Homo sapiens
QVDFQKTMKVTGVTTQGVKSL

SEQ ID NO: 2332 - protein, 21 aa, Homo sapiens
LQVDFQKTMKVTGVTTQGVKS

SEQ ID NO: 2333 - protein, 21 aa, Homo sapiens
WLQVDFQKTMKVTGVTTQGVK

SEQ ID NO: 2334 - protein, 21 aa, Homo sapiens
EWLQVDFQKTMKVTGVTTQGV

SEQ ID NO: 2335 - protein, 21 aa, Homo sapiens
KEWLQVDFQKTMKVTGVTTQG

SEQ ID NO: 2336 - protein, 21 aa, Homo sapiens
PKEWLQVDFQKTMKVTGVTTQ

SEQ ID NO: 2337 - protein, 21 aa, Homo sapiens
NPKEWLQVDFQKTMKVTGVTT

SEQ ID NO: 2338 - protein, 21 aa, Homo sapiens
NNPKEWLQVDFQKTMKVTGVT

SEQ ID NO: 2339 - protein, 21 aa, Homo sapiens
VNNPKEWLQVDFQKTMKVTGV

SEQ ID NO: 2340 - protein, 21 aa, Homo sapiens
QVNNPKEWLQVDFQKTMKVTG

SEQ ID NO: 2341 - protein, 21 aa, Homo sapiens
PQVNNPKEWLQVDFQKTMKVT

SEQ ID NO: 2342 - protein, 21 aa, Homo sapiens
RPQVNNPKEWLQVDFQKTMKV

SEQ ID NO: 2343 - protein, 21 aa, Homo sapiens
WRPQVNNPKEWLQVDFQKTMK

SEQ ID NO: 2344 - protein, 21 aa, Homo sapiens
AWRPQVNNPKEWLQVDFQKTM

SEQ ID NO: 2345 - protein, 21 aa, Homo sapiens
VKVTGVTTQGVKSLLTSMYVK

SEQ ID NO: 2346 - protein, 21 aa, Homo sapiens
TVKVTGVTTQGVKSLLTSMYV

SEQ ID NO: 2347 - protein, 21 aa, Homo sapiens
KTVKVTGVTTQGVKSLLTSMY

SEQ ID NO: 2348 - protein, 21 aa, Homo sapiens
QKTVKVTGVTTQGVKSLLTSM

SEQ ID NO: 2349 - protein, 21 aa, Homo sapiens
FQKTVKVTGVTTQGVKSLLTS

SEQ ID NO: 2350 - protein, 21 aa, Homo sapiens
DFQKTVKVTGVTTQGVKSLLT

SEQ ID NO: 2351 - protein, 21 aa, Homo sapiens
VDFQKTVKVTGVTTQGVKSLL

SEQ ID NO: 2352 - protein, 21 aa, Homo sapiens
QVDFQKTVKVTGVTTQGVKSL

SEQ ID NO: 2353 - protein, 21 aa, Homo sapiens
LQVDFQKTVKVTGVTTQGVKS

SEQ ID NO: 2354 - protein, 21 aa, Homo sapiens
WLQVDFQKTVKVTGVTTQGVK

SEQ ID NO: 2355 - protein, 21 aa, Homo sapiens
EWLQVDFQKTVKVTGVTTQGV

SEQ ID NO: 2356 - protein, 21 aa, Homo sapiens
KEWLQVDFQKTVKVTGVTTQG

SEQ ID NO: 2357 - protein, 21 aa, Homo sapiens
PKEWLQVDFQKTVKVTGVTTQ

SEQ ID NO: 2358 - protein, 21 aa, Homo sapiens
NPKEWLQVDFQKTVKVTGVTT

SEQ ID NO: 2359 - protein, 21 aa, Homo sapiens
NNPKEWLQVDFQKTVKVTGVT

SEQ ID NO: 2360 - protein, 21 aa, Homo sapiens
VNNPKEWLQVDFQKTVKVTGV

SEQ ID NO: 2361 - protein, 21 aa, Homo sapiens
QVNNPKEWLQVDFQKTVKVTG

SEQ ID NO: 2362 - protein, 21 aa, Homo sapiens
PQVNNPKEWLQVDFQKTVKVT

SEQ ID NO: 2363 - protein, 21 aa, Homo sapiens
RPQVNNPKEWLQVDFQKTVKV

SEQ ID NO: 2364 - protein, 20 aa, Homo sapiens
WRPQVNNPKEWLQVDFQKTV

SEQ ID NO: 2365 - protein, 21 aa, Homo sapiens
AWRPQVNNPKEWLQVDFQKTV

SEQ ID NO: 2366 - protein, 21 aa, Homo sapiens
PVVNSLDPPLLTRYLRIHPQS

SEQ ID NO: 2367 - protein, 21 aa, Homo sapiens
TPVVNSLDPPLLTRYLRIHPQ

SEQ ID NO: 2368 - protein, 21 aa, Homo sapiens
FTPVVNSLDPPLLTRYLRIHP

SEQ ID NO: 2369 - protein, 21 aa, Homo sapiens
SFTPVVNSLDPPLLTRYLRIH

SEQ ID NO: 2370 - protein, 21 aa, Homo sapiens
DSFTPVVNSLDPPLLTRYLRI

SEQ ID NO: 2371 - protein, 21 aa, Homo sapiens
QDSFTPVVNSLDPPLLTRYLR

SEQ ID NO: 2372 - protein, 21 aa, Homo sapiens
NQDSFTPVVNSLDPPLLTRYL

SEQ ID NO: 2373 - protein, 21 aa, Homo sapiens
GNQDSFTPVVNSLDPPLLTRY

SEQ ID NO: 2374 - protein, 21 aa, Homo sapiens
QGNQDSFTPVVNSLDPPLLTR

SEQ ID NO: 2375 - protein, 21 aa, Homo sapiens
FQGNQDSFTPVVNSLDPPLLT

SEQ ID NO: 2376 - protein, 21 aa, Homo sapiens
VFQGNQDSFTPVVNSLDPPLL

SEQ ID NO: 2377 - protein, 21 aa, Homo sapiens
KVFQGNQDSFTPVVNSLDPPL

SEQ ID NO: 2378 - protein, 21 aa, Homo sapiens
VKVFQGNQDSFTPVVNSLDPP

SEQ ID NO: 2379 - protein, 21 aa, Homo sapiens
KVKVFQGNQDSFTPVVNSLDP

SEQ ID NO: 2380 - protein, 21 aa, Homo sapiens
GKVKVFQGNQDSFTPVVNSLD

SEQ ID NO: 2381 - protein, 21 aa, Homo sapiens
NGKVKVFQGNQDSFTPVVNSL

SEQ ID NO: 2382 - protein, 21 aa, Homo sapiens
QNGKVKVFQGNQDSFTPVVNS

SEQ ID NO: 2383 - protein, 21 aa, Homo sapiens
FQNGKVKVFQGNQDSFTPVVN

SEQ ID NO: 2384 - protein, 21 aa, Homo sapiens
FFQNGKVKVFQGNQDSFTPVV

SEQ ID NO: 2385 - protein, 21 aa, Homo sapiens
LFFQNGKVKVFQGNQDSFTPV

SEQ ID NO: 2386 - protein, 21 aa, Homo sapiens
TLFFQNGKVKVFQGNQDSFTP

SEQ ID NO: 2387 - protein, 21 aa, Homo sapiens
SVVNSLDPPLLTRYLRIHPQS

SEQ ID NO: 2388 - protein, 21 aa, Homo sapiens
TSVVNSLDPPLLTRYLRIHPQ

SEQ ID NO: 2389 - protein, 21 aa, Homo sapiens
FTSVVNSLDPPLLTRYLRIHP

SEQ ID NO: 2390 - protein, 21 aa, Homo sapiens
SFTSVVNSLDPPLLTRYLRIH

SEQ ID NO: 2391 - protein, 21 aa, Homo sapiens
DSFTSVVNSLDPPLLTRYLRI

SEQ ID NO: 2392 - protein, 21 aa, Homo sapiens
QDSFTSVVNSLDPPLLTRYLR

SEQ ID NO: 2393 - protein, 21 aa, Homo sapiens
NQDSFTSVVNSLDPPLLTRYL

SEQ ID NO: 2394 - protein, 21 aa, Homo sapiens
GNQDSFTSVVNSLDPPLLTRY

SEQ ID NO: 2395 - protein, 21 aa, Homo sapiens
QGNQDSFTSVVNSLDPPLLTR

SEQ ID NO: 2396 - protein, 21 aa, Homo sapiens
FQGNQDSFTSVVNSLDPPLLT

SEQ ID NO: 2397 - protein, 21 aa, Homo sapiens
VFQGNQDSFTSVVNSLDPPLL

SEQ ID NO: 2398 - protein, 21 aa, Homo sapiens
KVFQGNQDSFTSVVNSLDPPL

SEQ ID NO: 2399 - protein, 21 aa, Homo sapiens [sequence omitted]

SEQ ID NO: 2400 - protein, 21 aa, Homo sapiens
KVKVFQGNQDSFTSVVNSLDP

SEQ ID NO: 2401 - protein, 21 aa, Homo sapiens
GKVKVFQGNQDSFTSVVNSLD

SEQ ID NO: 2402 - protein, 21 aa, Homo sapiens
NGKVKVFQGNQDSFTSVVNSL

SEQ ID NO: 2403 - protein, 21 aa, Homo sapiens
QNGKVKVFQGNQDSFTSVVNS

SEQ ID NO: 2404 - protein, 21 aa, Homo sapiens
FQNGKVKVFQGNQDSFTSVVN

SEQ ID NO: 2405 - protein, 21 aa, Homo sapiens
FFQNGKVKVFQGNQDSFTSVV

SEQ ID NO: 2406 - protein, 21 aa, Homo sapiens
LFFQNGKVKVFQGNQDSFTSV

SEQ ID NO: 2407 - protein, 21 aa, Homo sapiens
TLFFQNGKVKVFQGNQDSFTS

SEQ ID NO: 2408 - protein, 21 aa, Homo sapiens
MVFFGNVDSSGIKHNIFNPPI

SEQ ID NO: 2409 - protein, 21 aa, Homo sapiens
LMVFFGNVDSSGIKHNIFNPP

SEQ ID NO: 2410 - protein, 21 aa, Homo sapiens
TLMVFFGNVDSSGIKHNIFNP

SEQ ID NO: 2411 - protein, 21 aa, Homo sapiens
GTLMVFFGNVDSSGIKHNIFN

SEQ ID NO: 2412 - protein, 21 aa, Homo sapiens
TGTLMVFFGNVDSSGIKHNIF

SEQ ID NO: 2413 - protein, 21 aa, Homo sapiens
STGTLMVFFGNVDSSGIKHNI

SEQ ID NO: 2414 - protein, 21 aa, Homo sapiens
NSTGTLMVFFGNVDSSGIKHN

SEQ ID NO: 2415 - protein, 21 aa, Homo sapiens
GNSTGTLMVFFGNVDSSGIKH

SEQ ID NO: 2416 - protein, 21 aa, Homo sapiens
RGNSTGTLMVFFGNVDSSGIK

SEQ ID NO: 2417 - protein, 21 aa, Homo sapiens
YRGNSTGTLMVFFGNVDSSGI

SEQ ID NO: 2418 - protein, 21 aa, Homo sapiens
TYRGNSTGTLMVFFGNVDSSG

SEQ ID NO: 2419 - protein, 21 aa, Homo sapiens
QTYRGNSTGTLMVFFGNVDSS

SEQ ID NO: 2420 - protein, 21 aa, Homo sapiens
WQTYRGNSTGTLMVFFGNVDS

SEQ ID NO: 2421 - protein, 21 aa, Homo sapiens
KWQTYRGNSTGTLMVFFGNVD

SEQ ID NO: 2422 - protein, 21 aa, Homo sapiens
KKWQTYRGNSTGTLMVFFGNV

SEQ ID NO: 2423 - protein, 21 aa, Homo sapiens
GKKWQTYRGNSTGTLMVFFGN

SEQ ID NO: 2424 - protein, 21 aa, Homo sapiens
DGKKWQTYRGNSTGTLMVFFG

SEQ ID NO: 2425 - protein, 21 aa, Homo sapiens
LDGKKWQTYRGNSTGTLMVFF

SEQ ID NO: 2426 - protein, 21 aa, Homo sapiens
SLDGKKWQTYRGNSTGTLMVF

SEQ ID NO: 2427 - protein, 21 aa, Homo sapiens
YSLDGKKWQTYRGNSTGTLMV

SEQ ID NO: 2428 - protein, 15 aa, Homo sapiens
FSQNPPVLKRHQREI

SEQ ID NO: 2429 - protein, 15 aa, Homo sapiens
SFSQNPPVLKRHQRE

SEQ ID NO: 2430 - protein, 15 aa, Homo sapiens
RSFSQNPPVLKRHQR

SEQ ID NO: 2431 - protein, 15 aa, Homo sapiens
PRSFSQNPPVLKRHQ

SEQ ID NO: 2432 - protein, 15 aa, Homo sapiens
EPRSFSQNPPVLKRH

SEQ ID NO: 2433 - protein, 15 aa, Homo sapiens
IEPRSFSQNPPVLKR

SEQ ID NO: 2434 - protein, 15 aa, Homo sapiens
AIEPRSFSQNPPVLK

SEQ ID NO: 2435 - protein, 15 aa, Homo sapiens
NAIEPRSFSQNPPVL

SEQ ID NO: 2436 - protein, 15 aa, Homo sapiens
NNAIEPRSFSQNPPV

SEQ ID NO: 2437 - protein, 15 aa, Homo sapiens
KNNAIEPRSFSQNPP

SEQ ID NO: 2438 - protein, 15 aa, Homo sapiens
SKNNAIEPRSFSQNP
